(19) United States
(12) Patent Application Publication
(10) Pub. No.: US 2022/0340685 A1
(43) Pub. Date: Oct. 27, 2022

(54) COMBINATION THERAPY WITH ENTPD2 AND CD73 ANTIBODIES

(71) Applicant: Novartis AG, Basel (CH)

(72) Inventors: Michael DiDonato, San Diego, CA (US); Mirek Dostalek, Binningen (CH); Christoph Erkel, Puchheim (DE); Javier Estrada Diez, Somerville, MA (US); Anna Galkin, Encinitas, CA (US); Scott Martin Glaser, San Diego, CA (US); Klaus Felix Hartlepp, München (DE); Yong Jia, San Diego, CA (US); Deborah A. Knee, Del Mar, CA (US); Alexandra Kraus, München (DE); Christian Cho-Hua Lee, San Diego, CA (US); Luigi Manenti, Livingston, NJ (US); Sarah Michelle Rue, San Diego, CA (US); Jian Shi, San Diego, CA (US); Xenia Karola Wezler, München (DE); Gabrielle Wong, Cambridge, MA (US)

(21) Appl. No.: 17/642,766

(22) PCT Filed: Sep. 17, 2020
(86) PCT No.: PCT/IB2020/058649

§ 371 Date: Mar. 14, 2022

Related U.S. Application Data
(60) Provisional application No. 62/902,161, filed on Sep. 18, 2019.
(60) Provisional application No. 63/023,446, filed on May 12, 2020.

(51) Int. Cl. C07K 16/40; C07K 16/28; C07K 16/22; A61P 35/00

(52) U.S. Cl. CPC C07K 16/40; C07K 16/2896; C07K 16/2818; C07K 16/2827; C07K 16/22; A61P 35/00; C07K 2317/24; C07K 2317/55; C07K 2317/92; C07K 2317/33; A61K 2039/507

(57) ABSTRACT

Provided herein are combinations comprising an antibody or antigen-binding fragment thereof, e.g., a monoclonal antibody or antigen binding fragment thereof, that specifically binds to ENTPD2 (e.g., human ENTPD2 protein), and an antibody or antigen-binding fragment thereof, e.g., a monoclonal antibody or antigen binding fragment thereof, that specifically binds to CD73 (e.g., human CD73 protein), and methods of using these combinations.

### CROSS-REFERENCE TO RELATED APPLICATIONS

[0001] This application claims the benefit of U.S. Provisional Application No. 62/902,161 filed Sep. 18, 2019, and U.S. Provisional Application No. 63/023,446 filed May 12, 2020, the contents of which are hereby incorporated by reference in their entireties.

### SEQUENCE LISTING

[0002] The instant application contains a Sequence Listing which has been submitted electronically in ASCII format and is hereby incorporated by reference in its entirety. Said ASCII copy, created on Sep. 11, 2020, is named PAT058705-WO-PCT_SL.txt and is 683,463 bytes in size.

### TECHNICAL FIELD

[0003] The present invention relates to combination therapies comprising an antibody or antigen-binding fragment thereof that specifically binds to the ectoenzyme ectonucleoside triphosphate diphosphohydrolase 2 (ENTPD2) and an antibody or antigen-binding fragment thereof that specifically binds to CD73 (Cluster of Differentiation 73). Optionally the combination therapy may comprise at least one additional agent.

### BACKGROUND

[0004] Cancers develop by evading the immune system and this can occur by many mechanisms. One significant pathway involved in immune evasion includes the mass production of adenosine via hydrolysis of extracellular ATP (eATP) in the tumor leading to an immunosuppressive tumor microenvironment. The hydrolysis of eATP into adenosine occurs through a stepwise progression by ectonucleosidases, such as ENTPD2.

[0005] Decreasing eATP and increasing adenosine has been reported to have pleotropic immunosuppressive effects in the tumor microenvironment including: (1) enhancement of T regulatory cell function; (2) inhibition of CD4+ and CD8+ T effector cell function; (3) decreased capacity of Dendritic Cells to prime IFNg secreting T helper 1 (Th1) responses; (4) inhibition of NK cells function; and (5) conversion of macrophages to an immunosuppressive subset.

[0006] Treatment of ENTPD2 positive tumors with an antagonistic anti-ENTPD2 antibody (Ab) is thought to result in an increase in eATP and a resulting influx of immune cells.

[0007] There exists a need for improved strategies for targeting diseases such as cancer using an anti-ENTPD2 antibody.

### SUMMARY OF THE INVENTION

[0008] Provided herein is a combination comprising antibodies or antigen-binding fragments thereof, e.g., monoclonal antibodies or antigen-binding fragments thereof, that specifically bind to the ectoenzyme ectonucleoside triphosphate diphosphohydrolase 2 (ENTPD2) and antibodies or antigen-binding fragments thereof, e.g., monoclonal antibodies or antigen-binding fragments thereof, that specifically bind to CD73 (Cluster of Differentiation 73). The combination of ENTPD2 antibodies or antigen-binding fragments thereof and CD73 antibodies or antigen binding fragments thereof are useful for treating ENTPD2-associated diseases, such as cancer.

[0009] In one aspect, the invention relates to a combination comprising a) an anti-human ENTPD2 antibody or antigen binding fragment thereof, wherein the antibody or antigen binding fragment thereof comprises a heavy chain complementary determining region 1 (HCDR1), a heavy chain complementary determining region 2 (HCDR2), a heavy chain complementary determining region 3 (HCDR3), a light chain complementary determining region 1 (LCDR1), a light chain complementary determining region 2 (LCDR2), and a light chain complementary determining region 3 (LCDR3) of any antibody or antigen binding fragment provided in Table 1 and b) an anti-human CD73 antibody or antigen binding fragment thereof, wherein the antibody or antigen binding fragment thereof comprises a heavy chain complementary determining region 1 (HCDR1), a heavy chain complementary determining region 2 (HCDR2), a heavy chain complementary determining region 3 (HCDR3), a light chain complementary determining region 1 (LCDR1), a light chain complementary determining region 2 (LCDR2), and a light chain complementary determining region 3 (LCDR3) of any antibody or antigen binding fragment provided in Table 2.

[0010] In some embodiments, the HCDR1, HCDR2, HCDR3, LCDR1, LCDR2, and LCDR3 of such anti-human ENTPD2 antibodies or antigen binding fragments thereof are selected from the HCDR1, HCDR2, HCDR3, LCDR1, LCDR2, and LCDR3 sequences provided in Table 1.

[0011] In some embodiments, such anti-human ENTPD2 antibodies or antigen binding fragments thereof comprise a heavy chain variable region (VH) provided in Table 1. In some embodiments, such anti-human ENTPD2 antibodies or antigen binding fragments comprise a light chain variable region (VL) provided in Table 1.

[0012] In another aspect, the invention relates to a combination comprising an anti-human ENTPD2 antibody or antigen binding fragment thereof selected from any one of the following:
[0013] 1) an antibody or antigen binding fragment thereof comprising:
[0014] an HCDR1 sequence comprising SEQ ID NO: 1,
[0015] an HCDR2 sequence comprising SEQ ID NO: 2,
[0016] an HCDR3 sequence comprising SEQ ID NO: 3,
[0017] an LCDR1 sequence comprising SEQ ID NO: 14,
[0018] an LCDR2 sequence comprising SEQ ID NO: 15, and
[0019] an LCDR3 sequence comprising SEQ ID NO: 16;
[0020] 2) an antibody or antigen binding fragment thereof comprising:
[0021] an HCDR1 sequence comprising SEQ ID NO: 4,
[0022] an HCDR2 sequence comprising SEQ ID NO: 5,
[0023] an HCDR3 sequence comprising SEQ ID NO: 3,
[0024] an LCDR1 sequence comprising SEQ ID NO: 17,
[0025] an LCDR2 sequence comprising SEQ ID NO: 18, and
[0026] an LCDR3 sequence comprising SEQ ID NO: 19;
[0027] 3) an antibody or antigen binding fragment thereof comprising:
[0028] an HCDR1 sequence comprising SEQ ID NO: 7,
[0029] an HCDR2 sequence comprising SEQ ID NO: 8,
[0030] an HCDR3 sequence comprising SEQ ID NO: 9,
[0031] an LCDR1 sequence comprising SEQ ID NO: 20,
[0032] an LCDR2 sequence comprising SEQ ID NO: 18, and
[0033] an LCDR3 sequence comprising SEQ ID NO: 16;
[0034] 4) an antibody or antigen binding fragment thereof comprising:
[0035] an HCDR1 sequence comprising SEQ ID NO: 37,
[0036] an HCDR2 sequence comprising SEQ ID NO: 38,
[0037] an HCDR3 sequence comprising SEQ ID NO: 39,
[0038] an LCDR1 sequence comprising SEQ ID NO: 50,
[0039] an LCDR2 sequence comprising SEQ ID NO: 51, and
[0040] an LCDR3 sequence comprising SEQ ID NO: 52;
[0041] 5) an antibody or antigen binding fragment thereof comprising:
[0042] an HCDR1 sequence comprising SEQ ID NO: 40,
[0043] an HCDR2 sequence comprising SEQ ID NO: 41,
[0044] an HCDR3 sequence comprising SEQ ID NO: 39,
[0045] an LCDR1 sequence comprising SEQ ID NO: 53,
[0046] an LCDR2 sequence comprising SEQ ID NO: 54, and
[0047] an LCDR3 sequence comprising SEQ ID NO: 55;
[0048] 6) an antibody or antigen binding fragment thereof comprising:
[0049] an HCDR1 sequence comprising SEQ ID NO: 43,
[0050] an HCDR2 sequence comprising SEQ ID NO: 44,
[0051] an HCDR3 sequence comprising SEQ ID NO: 45,
[0052] an LCDR1 sequence comprising SEQ ID NO: 56,
[0053] an LCDR2 sequence comprising SEQ ID NO: 54, and
[0054] an LCDR3 sequence comprising SEQ ID NO: 52;
[0055] 7) an antibody or antigen binding fragment thereof comprising:
[0056] an HCDR1 sequence comprising SEQ ID NO: 37,
[0057] an HCDR2 sequence comprising SEQ ID NO: 38,
[0058] an HCDR3 sequence comprising SEQ ID NO: 39,
[0059] an LCDR1 sequence comprising SEQ ID NO: 61,
[0060] an LCDR2 sequence comprising SEQ ID NO: 51, and
[0061] an LCDR3 sequence comprising SEQ ID NO: 52;
[0062] 8) an antibody or antigen binding fragment thereof comprising:
[0063] an HCDR1 sequence comprising SEQ ID NO: 40,
[0064] an HCDR2 sequence comprising SEQ ID NO: 41,
[0065] an HCDR3 sequence comprising SEQ ID NO: 39,
[0066] an LCDR1 sequence comprising SEQ ID NO: 62,
[0067] an LCDR2 sequence comprising SEQ ID NO: 54, and
[0068] an LCDR3 sequence comprising SEQ ID NO: 55;
[0069] 9) an antibody or antigen binding fragment thereof comprising:
[0070] an HCDR1 sequence comprising SEQ ID NO: 43,
[0071] an HCDR2 sequence comprising SEQ ID NO: 44,
[0072] an HCDR3 sequence comprising SEQ ID NO: 45,
[0073] an LCDR1 sequence comprising SEQ ID NO: 63,
[0074] an LCDR2 sequence comprising SEQ ID NO: 54, and
[0075] an LCDR3 sequence comprising SEQ ID NO: 52;
[0076] 10) an antibody or antigen binding fragment thereof comprising:
[0077] an HCDR1 sequence comprising SEQ ID NO: 37,
[0078] an HCDR2 sequence comprising SEQ ID NO: 38,
[0079] an HCDR3 sequence comprising SEQ ID NO: 68,
[0080] an LCDR1 sequence comprising SEQ ID NO: 50,
[0081] an LCDR2 sequence comprising SEQ ID NO: 51, and
[0082] an LCDR3 sequence comprising SEQ ID NO: 52;
[0083] 11) an antibody or antigen binding fragment thereof comprising:
[0084] an HCDR1 sequence comprising SEQ ID NO: 40,
[0085] an HCDR2 sequence comprising SEQ ID NO: 41,
[0086] an HCDR3 sequence comprising SEQ ID NO: 68,
[0087] an LCDR1 sequence comprising SEQ ID NO: 53,
[0088] an LCDR2 sequence comprising SEQ ID NO: 54, and
[0089] an LCDR3 sequence comprising SEQ ID NO: 55;
[0090] 12) an antibody or antigen binding fragment thereof comprising:
[0091] an HCDR1 sequence comprising SEQ ID NO: 43,
[0092] an HCDR2 sequence comprising SEQ ID NO: 44,
[0093] an HCDR3 sequence comprising SEQ ID NO: 69,
[0094] an LCDR1 sequence comprising SEQ ID NO: 56,
[0095] an LCDR2 sequence comprising SEQ ID NO: 54, and
[0096] an LCDR3 sequence comprising SEQ ID NO: 52;
[0097] 13) an antibody or antigen binding fragment thereof comprising:
[0098] an HCDR1 sequence comprising SEQ ID NO: 82,
[0099] an HCDR2 sequence comprising SEQ ID NO: 83,
[0100] an HCDR3 sequence comprising SEQ ID NO: 84,
[0101] an LCDR1 sequence comprising SEQ ID NO: 95,
[0102] an LCDR2 sequence comprising SEQ ID NO: 96, and
[0103] an LCDR3 sequence comprising SEQ ID NO: 97;
[0104] 14) an antibody or antigen binding fragment thereof comprising:
[0105] an HCDR1 sequence comprising SEQ ID NO: 85,
[0106] an HCDR2 sequence comprising SEQ ID NO: 86,
[0107] an HCDR3 sequence comprising SEQ ID NO: 84,
[0108] an LCDR1 sequence comprising SEQ ID NO: 98,
[0109] an LCDR2 sequence comprising SEQ ID NO: 99, and
[0110] an LCDR3 sequence comprising SEQ ID NO: 100;
[0111] 15) an antibody or antigen binding fragment thereof comprising:
[0112] an HCDR1 sequence comprising SEQ ID NO: 88,
[0113] an HCDR2 sequence comprising SEQ ID NO: 89,
[0114] an HCDR3 sequence comprising SEQ ID NO: 90,
[0115] an LCDR1 sequence comprising SEQ ID NO: 101,
[0116] an LCDR2 sequence comprising SEQ ID NO: 99, and
[0117] an LCDR3 sequence comprising SEQ ID NO: 97;
[0118] 16) an antibody or antigen binding fragment thereof comprising:
[0119] an HCDR1 sequence comprising SEQ ID NO: 106,
[0120] an HCDR2 sequence comprising SEQ ID NO: 107,
[0121] an HCDR3 sequence comprising SEQ ID NO: 108,
[0122] an LCDR1 sequence comprising SEQ ID NO: 119,
[0123] an LCDR2 sequence comprising SEQ ID NO: 120, and
[0124] an LCDR3 sequence comprising SEQ ID NO: 121;
[0125] 17) an antibody or antigen binding fragment thereof comprising:
[0126] an HCDR1 sequence comprising SEQ ID NO: 109,
[0127] an HCDR2 sequence comprising SEQ ID NO: 110,
[0128] an HCDR3 sequence comprising SEQ ID NO: 108,
[0129] an LCDR1 sequence comprising SEQ ID NO: 122,
[0130] an LCDR2 sequence comprising SEQ ID NO: 99, and
[0131] an LCDR3 sequence comprising SEQ ID NO: 123;
[0132] 18) an antibody or antigen binding fragment thereof comprising:
[0133] an HCDR1 sequence comprising SEQ ID NO: 112,
[0134] an HCDR2 sequence comprising SEQ ID NO: 113,
[0135] an HCDR3 sequence comprising SEQ ID NO: 114,
[0136] an LCDR1 sequence comprising SEQ ID NO: 124,
[0137] an LCDR2 sequence comprising SEQ ID NO: 99, and
[0138] an LCDR3 sequence comprising SEQ ID NO: 121;
[0139] 19) an antibody or antigen binding fragment thereof comprising:
[0140] an HCDR1 sequence comprising SEQ ID NO: 106,
[0141] an HCDR2 sequence comprising SEQ ID NO: 129,
[0142] an HCDR3 sequence comprising SEQ ID NO: 108,
[0143] an LCDR1 sequence comprising SEQ ID NO: 119,
[0144] an LCDR2 sequence comprising SEQ ID NO: 120, and
[0145] an LCDR3 sequence comprising SEQ ID NO: 121;
[0146] 20) an antibody or antigen binding fragment thereof comprising:
[0147] an HCDR1 sequence comprising SEQ ID NO: 109,
[0148] an HCDR2 sequence comprising SEQ ID NO: 130,
[0149] an HCDR3 sequence comprising SEQ ID NO: 108
[0150] an LCDR1 sequence comprising SEQ ID NO: 122,
[0151] an LCDR2 sequence comprising SEQ ID NO: 99, and
[0152] an LCDR3 sequence comprising SEQ ID NO: 123;
[0153] 21) an antibody or antigen binding fragment thereof comprising:
[0154] an HCDR1 sequence comprising SEQ ID NO: 112,
[0155] an HCDR2 sequence comprising SEQ ID NO: 131,
[0156] an HCDR3 sequence comprising SEQ ID NO: 114,
[0157] an LCDR1 sequence comprising SEQ ID NO: 124,
[0158] an LCDR2 sequence comprising SEQ ID NO: 99, and
[0159] an LCDR3 sequence comprising SEQ ID NO: 121;
[0160] 22) an antibody or antigen binding fragment thereof comprising:
[0161] an HCDR1 sequence comprising SEQ ID NO: 136,
[0162] an HCDR2 sequence comprising SEQ ID NO: 137,
[0163] an HCDR3 sequence comprising SEQ ID NO: 138,
[0164] an LCDR1 sequence comprising SEQ ID NO: 149,
[0165] an LCDR2 sequence comprising SEQ ID NO: 150, and
[0166] an LCDR3 sequence comprising SEQ ID NO: 151;
[0167] 23) an antibody or antigen binding fragment thereof comprising:
[0168] an HCDR1 sequence comprising SEQ ID NO: 139,
[0169] an HCDR2 sequence comprising SEQ ID NO: 140,
[0170] an HCDR3 sequence comprising SEQ ID NO: 138,
[0171] an LCDR1 sequence comprising SEQ ID NO: 152,
[0172] an LCDR2 sequence comprising SEQ ID NO: 153, and
[0173] an LCDR3 sequence comprising SEQ ID NO: 154;
[0174] 24) an antibody or antigen binding fragment thereof comprising:
[0175] an HCDR1 sequence comprising SEQ ID NO: 142,
[0176] an HCDR2 sequence comprising SEQ ID NO: 143,
[0177] an HCDR3 sequence comprising SEQ ID NO: 144,
[0178] an LCDR1 sequence comprising SEQ ID NO: 155,
[0179] an LCDR2 sequence comprising SEQ ID NO: 153, and
[0180] an LCDR3 sequence comprising SEQ ID NO: 151;
[0181] 25) an antibody or antigen binding fragment thereof comprising:
[0182] an HCDR1 sequence comprising SEQ ID NO: 160,
[0183] an HCDR2 sequence comprising SEQ ID NO: 161,
[0184] an HCDR3 sequence comprising SEQ ID NO: 162,
[0185] an LCDR1 sequence comprising SEQ ID NO: 173,
[0186] an LCDR2 sequence comprising SEQ ID NO: 150, and
[0187] an LCDR3 sequence comprising SEQ ID NO: 174;
[0188] 26) an antibody or antigen binding fragment thereof comprising:
[0189] an HCDR1 sequence comprising SEQ ID NO: 163,
[0190] an HCDR2 sequence comprising SEQ ID NO: 164,
[0191] an HCDR3 sequence comprising SEQ ID NO: 162,
[0192] an LCDR1 sequence comprising SEQ ID NO: 175,
[0193] an LCDR2 sequence comprising SEQ ID NO: 153, and
[0194] an LCDR3 sequence comprising SEQ ID NO: 176;
[0195] 27) an antibody or antigen binding fragment thereof comprising:
[0196] an HCDR1 sequence comprising SEQ ID NO: 166,
[0197] an HCDR2 sequence comprising SEQ ID NO: 167,
[0198] an HCDR3 sequence comprising SEQ ID NO: 168,
[0199] an LCDR1 sequence comprising SEQ ID NO: 177,
[0200] an LCDR2 sequence comprising SEQ ID NO: 153, and
[0201] an LCDR3 sequence comprising SEQ ID NO: 174;
[0202] 28) an antibody or antigen binding fragment thereof comprising:
[0203] an HCDR1 sequence comprising SEQ ID NO: 37,
[0204] an HCDR2 sequence comprising SEQ ID NO: 220,
[0205] an HCDR3 sequence comprising SEQ ID NO: 221,
[0206] an LCDR1 sequence comprising SEQ ID NO: 61,
[0207] an LCDR2 sequence comprising SEQ ID NO: 51, and
[0208] an LCDR3 sequence comprising SEQ ID NO: 52;
[0209] 29) an antibody or antigen binding fragment thereof comprising:
[0210] an HCDR1 sequence comprising SEQ ID NO: 40,
[0211] an HCDR2 sequence comprising SEQ ID NO: 222,
[0212] an HCDR3 sequence comprising SEQ ID NO: 221,
[0213] an LCDR1 sequence comprising SEQ ID NO: 62,
[0214] an LCDR2 sequence comprising SEQ ID NO: 54, and
[0215] an LCDR3 sequence comprising SEQ ID NO: 55;
[0216] 30) an antibody or antigen binding fragment thereof comprising:
[0217] an HCDR1 sequence comprising SEQ ID NO: 43,
[0218] an HCDR2 sequence comprising SEQ ID NO: 223,
[0219] an HCDR3 sequence comprising SEQ ID NO: 224,
[0220] an LCDR1 sequence comprising SEQ ID NO: 63,
[0221] an LCDR2 sequence comprising SEQ ID NO: 54, and
[0222] an LCDR3 sequence comprising SEQ ID NO: 52;
[0223] 31) an antibody or antigen binding fragment thereof comprising:
[0224] an HCDR1 sequence comprising SEQ ID NO: 37,
[0225] an HCDR2 sequence comprising SEQ ID NO: 220,
[0226] an HCDR3 sequence comprising SEQ ID NO: 68,
[0227] an LCDR1 sequence comprising SEQ ID NO: 61,
[0228] an LCDR2 sequence comprising SEQ ID NO: 51, and
[0229] an LCDR3 sequence comprising SEQ ID NO: 52;
[0230] 32) an antibody or antigen binding fragment thereof comprising:
[0231] an HCDR1 sequence comprising SEQ ID NO: 40,
[0232] an HCDR2 sequence comprising SEQ ID NO: 222,
[0233] an HCDR3 sequence comprising SEQ ID NO: 68,
[0234] an LCDR1 sequence comprising SEQ ID NO: 62,
[0235] an LCDR2 sequence comprising SEQ ID NO: 54, and
[0236] an LCDR3 sequence comprising SEQ ID NO: 55;
[0237] 33) an antibody or antigen binding fragment thereof comprising:
[0238] an HCDR1 sequence comprising SEQ ID NO: 43,
[0239] an HCDR2 sequence comprising SEQ ID NO: 223,
[0240] an HCDR3 sequence comprising SEQ ID NO: 69,
[0241] an LCDR1 sequence comprising SEQ ID NO: 63,
[0242] an LCDR2 sequence comprising SEQ ID NO: 54, and
[0243] an LCDR3 sequence comprising SEQ ID NO: 52;
[0244] 34) an antibody or antigen binding fragment thereof comprising:
[0245] an HCDR1 sequence comprising SEQ ID NO: 1,
[0246] an HCDR2 sequence comprising SEQ ID NO: 245,
[0247] an HCDR3 sequence comprising SEQ ID NO: 246,
[0248] an LCDR1 sequence comprising SEQ ID NO: 254,
[0249] an LCDR2 sequence comprising SEQ ID NO: 15, and
[0250] an LCDR3 sequence comprising SEQ ID NO: 255;
[0251] 35) an antibody or antigen binding fragment thereof comprising:
[0252] an HCDR1 sequence comprising SEQ ID NO: 4,
[0253] an HCDR2 sequence comprising SEQ ID NO: 247,
[0254] an HCDR3 sequence comprising SEQ ID NO: 246,
[0255] an LCDR1 sequence comprising SEQ ID NO: 17,
[0256] an LCDR2 sequence comprising SEQ ID NO: 18, and
[0257] an LCDR3 sequence comprising SEQ ID NO: 256;
[0258] 36) an antibody or antigen binding fragment thereof comprising:
[0259] an HCDR1 sequence comprising SEQ ID NO: 7,
[0260] an HCDR2 sequence comprising SEQ ID NO: 248,
[0261] an HCDR3 sequence comprising SEQ ID NO: 249,
[0262] an LCDR1 sequence comprising SEQ ID NO: 20,
[0263] an LCDR2 sequence comprising SEQ ID NO: 18, and
[0264] an LCDR3 sequence comprising SEQ ID NO: 255;
[0265] 37) an antibody or antigen binding fragment thereof comprising:
[0266] an HCDR1 sequence comprising SEQ ID NO: 1,
[0267] an HCDR2 sequence comprising SEQ ID NO: 261,
[0268] an HCDR3 sequence comprising SEQ ID NO: 262,
[0269] an LCDR1 sequence comprising SEQ ID NO: 254,
[0270] an LCDR2 sequence comprising SEQ ID NO: 15, and
[0271] an LCDR3 sequence comprising SEQ ID NO: 16;
[0272] 38) an antibody or antigen binding fragment thereof comprising:
[0273] an HCDR1 sequence comprising SEQ ID NO: 4,
[0274] an HCDR2 sequence comprising SEQ ID NO: 247,
[0275] an HCDR3 sequence comprising SEQ ID NO: 262,
[0276] an LCDR1 sequence comprising SEQ ID NO: 17,
[0277] an LCDR2 sequence comprising SEQ ID NO: 18, and
[0278] an LCDR3 sequence comprising SEQ ID NO: 19;
[0279] 39) an antibody or antigen binding fragment thereof comprising:
[0280] an HCDR1 sequence comprising SEQ ID NO: 7,
[0281] an HCDR2 sequence comprising SEQ ID NO: 248,
[0282] an HCDR3 sequence comprising SEQ ID NO: 263,
[0283] an LCDR1 sequence comprising SEQ ID NO: 20,
[0284] an LCDR2 sequence comprising SEQ ID NO: 18, and
[0285] an LCDR3 sequence comprising SEQ ID NO: 16;
[0286] 40) an antibody or antigen binding fragment thereof comprising:
[0287] an HCDR1 sequence comprising SEQ ID NO: 272,
[0288] an HCDR2 sequence comprising SEQ ID NO: 273,
[0289] an HCDR3 sequence comprising SEQ ID NO: 274,
[0290] an LCDR1 sequence comprising SEQ ID NO: 254,
[0291] an LCDR2 sequence comprising SEQ ID NO: 285, and
[0292] an LCDR3 sequence comprising SEQ ID NO: 16;
[0293] 41) an antibody or antigen binding fragment thereof comprising:
[0294] an HCDR1 sequence comprising SEQ ID NO: 275,
[0295] an HCDR2 sequence comprising SEQ ID NO: 276,
[0296] an HCDR3 sequence comprising SEQ ID NO: 274,
[0297] an LCDR1 sequence comprising SEQ ID NO: 17,
[0298] an LCDR2 sequence comprising SEQ ID NO: 286, and
[0299] an LCDR3 sequence comprising SEQ ID NO: 19;
[0300] 42) an antibody or antigen binding fragment thereof comprising:
[0301] an HCDR1 sequence comprising SEQ ID NO: 278,
[0302] an HCDR2 sequence comprising SEQ ID NO: 279,
[0303] an HCDR3 sequence comprising SEQ ID NO: 280,
[0304] an LCDR1 sequence comprising SEQ ID NO: 20,
[0305] an LCDR2 sequence comprising SEQ ID NO: 286, and
[0306] an LCDR3 sequence comprising SEQ ID NO: 16.

[0307] In another aspect, the invention relates to a combination comprising an anti-human ENTPD2 antibody or antigen binding fragment thereof selected from any one of the following:
[0308] an antibody or antigen binding fragment thereof comprising a VH comprising SEQ ID NO: 10 or a sequence at least about 95% or more identical thereto, and a VL comprising SEQ ID NO: 21 or a sequence at least about 95% or more identical thereto;
[0309] an antibody or antigen binding fragment thereof comprising a VH comprising SEQ ID NO: 25 or a sequence at least about 95% or more identical thereto, and a VL comprising SEQ ID NO: 29 or a sequence at least about 95% or more identical thereto;
[0310] an antibody or antigen binding fragment thereof comprising a VH comprising SEQ ID NO: 33 or a sequence at least about 95% or more identical thereto, and a VL comprising SEQ ID NO: 29 or a sequence at least about 95% or more identical thereto;
[0311] an antibody or antigen binding fragment thereof comprising a VH comprising SEQ ID NO: 46 or a sequence at least about 95% or more identical thereto, and a VL comprising SEQ ID NO: 57 or a sequence at least about 95% or more identical thereto;
[0312] an antibody or antigen binding fragment thereof comprising a VH comprising SEQ ID NO: 46 or a sequence at least about 95% or more identical thereto, and a VL comprising SEQ ID NO: 64 or a sequence at least about 95% or more identical thereto;
[0313] an antibody or antigen binding fragment thereof comprising a VH comprising SEQ ID NO: 70 or a sequence at least about 95% or more identical thereto, and a VL comprising SEQ ID NO: 74 or a sequence at least about 95% or more identical thereto;
[0314] an antibody or antigen binding fragment thereof comprising a VH comprising SEQ ID NO: 25 or a sequence at least about 95% or more identical thereto, and a VL comprising SEQ ID NO: 78 or a sequence at least about 95% or more identical thereto;
[0315] an antibody or antigen binding fragment thereof comprising a VH comprising SEQ ID NO: 91 or a sequence at least about 95% or more identical thereto, and a VL comprising SEQ ID NO: 102 or a sequence at least about 95% or more identical thereto;
[0316] an antibody or antigen binding fragment thereof comprising a VH comprising SEQ ID NO: 115 or a sequence at least about 95% or more identical thereto, and a VL comprising SEQ ID NO: 125 or a sequence at least about 95% or more identical thereto;
[0317] an antibody or antigen binding fragment thereof comprising a VH comprising SEQ ID NO: 132 or a sequence at least about 95% or more identical thereto, and a VL comprising SEQ ID NO: 125 or a sequence at least about 95% or more identical thereto;
[0318] an antibody or antigen binding fragment thereof comprising a VH comprising SEQ ID NO: 145 or a sequence at least about 95% or more identical thereto, and a VL comprising SEQ ID NO: 156 or a sequence at least about 95% or more identical thereto;
[0319] an antibody or antigen binding fragment thereof comprising a VH comprising SEQ ID NO: 169 or a sequence at least about 95% or more identical thereto, and a VL comprising SEQ ID NO: 178 or a sequence at least about 95% or more identical thereto;
[0320] an antibody or antigen binding fragment thereof comprising a VH comprising SEQ ID NO: 225 or a sequence at least about 95% or more identical thereto, and a VL comprising SEQ ID NO: 229 or a sequence at least about 95% or more identical thereto;
[0321] an antibody or antigen binding fragment thereof comprising a VH comprising SEQ ID NO: 233 or a sequence at least about 95% or more identical thereto, and a VL comprising SEQ ID NO: 237 or a sequence at least about 95% or more identical thereto;
[0322] an antibody or antigen binding fragment thereof comprising a VH comprising SEQ ID NO: 241 or a sequence at least about 95% or more identical thereto, and a VL comprising SEQ ID NO: 229 or a sequence at least about 95% or more identical thereto;
[0323] an antibody or antigen binding fragment thereof comprising a VH comprising SEQ ID NO: 250 or a sequence at least about 95% or more identical thereto, and a VL comprising SEQ ID NO: 257 or a sequence at least about 95% or more identical thereto;
[0324] an antibody or antigen binding fragment thereof comprising a VH comprising SEQ ID NO: 264 or a sequence at least about 95% or more identical thereto, and a VL comprising SEQ ID NO: 268 or a sequence at least about 95% or more identical thereto; or
[0325] an antibody or antigen binding fragment thereof comprising a VH comprising SEQ ID NO: 281 or a sequence at least about 95% or more identical thereto, and a VL comprising SEQ ID NO: 287 or a sequence at least about 95% or more identical thereto.

[0326] In another aspect, the invention relates to a combination comprising an anti-human ENTPD2 antibody or antigen binding fragment thereof selected from any one of the following:
[0327] 1) an antibody comprising a heavy chain comprising SEQ ID NO: 12 or a sequence at least about 95% or more identical thereto, and a light chain comprising SEQ ID NO: 23 or a sequence at least about 95% or more identical thereto;
[0328] 2) an antibody comprising a heavy chain comprising SEQ ID NO: 27 or a sequence at least about 95% or more identical thereto, and a light chain comprising SEQ ID NO: 31 or a sequence at least about 95% or more identical thereto;
[0329] 3) an antibody comprising a heavy chain comprising SEQ ID NO: 35 or a sequence at least about 95% or more identical thereto, and a light chain comprising SEQ ID NO: 31 or a sequence at least about 95% or more identical thereto;
[0330] 4) an antibody comprising a heavy chain comprising SEQ ID NO: 48 or a sequence at least about 95% or more identical thereto, and a light chain comprising SEQ ID NO: 59 or a sequence at least about 95% or more identical thereto;
[0331] 5) an antibody comprising a heavy chain comprising SEQ ID NO: 48 or a sequence at least about 95% or more identical thereto, and a light chain comprising SEQ ID NO: 66 or a sequence at least about 95% or more identical thereto;
[0332] 6) an antibody comprising a heavy chain comprising SEQ ID NO: 72 or a sequence at least about 95% or more identical thereto, and a light chain comprising SEQ ID NO: 76 or a sequence at least about 95% or more identical thereto;
[0333] 7) an antibody comprising a heavy chain comprising SEQ ID NO: 27 or a sequence at least about 95% or more identical thereto, and a light chain comprising SEQ ID NO: 80 or a sequence at least about 95% or more identical thereto;
[0334] 8) an antibody comprising a heavy chain comprising SEQ ID NO: 93 or a sequence at least about 95% or more identical thereto, and a light chain comprising SEQ ID NO: 104 or a sequence at least about 95% or more identical thereto;
[0335] 9) an antibody comprising a heavy chain comprising SEQ ID NO: 117 or a sequence at least about 95% or more identical thereto, and a light chain comprising SEQ ID NO: 127 or a sequence at least about 95% or more identical thereto;
[0336] 10) an antibody comprising a heavy chain comprising SEQ ID NO: 134 or a sequence at least about 95% or more identical thereto, and a light chain comprising SEQ ID NO: 127 or a sequence at least about 95% or more identical thereto;
[0337] 11) an antibody comprising a heavy chain comprising SEQ ID NO: 147 or a sequence at least about 95% or more identical thereto, and a light chain comprising SEQ ID NO: 158 or a sequence at least about 95% or more identical thereto;
[0338] 12) an antibody comprising a heavy chain comprising SEQ ID NO: 171 or a sequence at least about 95% or more identical thereto, and a light chain comprising SEQ ID NO: 180 or a sequence at least about 95% or more identical thereto;
[0339] 13) an antibody comprising a heavy chain comprising SEQ ID NO: 227 or a sequence at least about 95% or more identical thereto, and a light chain comprising SEQ ID NO: 231 or a sequence at least about 95% or more identical thereto;
[0340] 14) an antibody comprising a heavy chain comprising SEQ ID NO: 235 or a sequence at least about 95% or more identical thereto, and a light chain comprising SEQ ID NO: 239 or a sequence at least about 95% or more identical thereto;
[0341] 15) an antibody comprising a heavy chain comprising SEQ ID NO: 243 or a sequence at least about 95% or more identical thereto, and a light chain comprising SEQ ID NO: 231 or a sequence at least about 95% or more identical thereto;
[0342] 16) an antibody comprising a heavy chain comprising SEQ ID NO: 252 or a sequence at least about 95% or more identical thereto, and a light chain comprising SEQ ID NO: 259 or a sequence at least about 95% or more identical thereto;
[0343] 17) an antibody comprising a heavy chain comprising SEQ ID NO: 266 or a sequence at least about 95% or more identical thereto, and a light chain comprising SEQ ID NO: 270 or a sequence at least about 95% or more identical thereto; or
[0344] 18) an antibody comprising a heavy chain comprising SEQ ID NO: 283 or a sequence at least about 95% or more identical thereto, and a light chain comprising SEQ ID NO: 289 or a sequence at least about 95% or more identical thereto.

[0345] In an embodiment, the invention relates to a combination comprising an anti-human ENTPD2 antibody or antigen binding fragment thereof wherein the anti-human ENTPD2 antibody or antigen binding fragment thereof comprises:
[0346] an HCDR1 sequence comprising SEQ ID NO: 1,
[0347] an HCDR2 sequence comprising SEQ ID NO: 2,
[0348] an HCDR3 sequence comprising SEQ ID NO: 3,
[0349] an LCDR1 sequence comprising SEQ ID NO: 14,
[0350] an LCDR2 sequence comprising SEQ ID NO: 15, and
[0351] an LCDR3 sequence comprising SEQ ID NO: 16.

[0352] In an embodiment, the invention relates to a combination comprising an anti-human ENTPD2 antibody or antigen binding fragment thereof wherein the anti-human ENTPD2 antibody or antigen binding fragment thereof comprises:
[0353] an HCDR1 sequence comprising SEQ ID NO: 4,
[0354] an HCDR2 sequence comprising SEQ ID NO: 5,
[0355] an HCDR3 sequence comprising SEQ ID NO: 3,
[0356] an LCDR1 sequence comprising SEQ ID NO: 17,
[0357] an LCDR2 sequence comprising SEQ ID NO: 18, and
[0358] an LCDR3 sequence comprising SEQ ID NO: 19.

[0359] In an embodiment, the invention relates to a combination comprising an anti-human ENTPD2 antibody or antigen binding fragment thereof wherein the anti-human ENTPD2 antibody or antigen binding fragment thereof comprises:
[0360] an HCDR1 sequence comprising SEQ ID NO: 7,
[0361] an HCDR2 sequence comprising SEQ ID NO: 8,
[0362] an HCDR3 sequence comprising SEQ ID NO: 9,
[0363] an LCDR1 sequence comprising SEQ ID NO: 20,
[0364] an LCDR2 sequence comprising SEQ ID NO: 18, and
[0365] an LCDR3 sequence comprising SEQ ID NO: 16.

[0366] In an embodiment, the invention relates to a combination comprising an anti-human ENTPD2 antibody or antigen binding fragment thereof wherein the anti-human ENTPD2 antibody or antigen binding fragment thereof comprises a heavy chain variable region (VH) comprising SEQ ID NO: 10 or a sequence at least about 95% or more identical thereto, and a light chain variable region (VL) comprising SEQ ID NO: 21 or a sequence at least about 95% or more identical thereto.

[0367] In an embodiment, the invention relates to a combination comprising an anti-human ENTPD2 antibody or antigen binding fragment thereof wherein the anti-human ENTPD2 antibody or antigen binding fragment thereof comprises SEQ ID NO: 12 or a sequence at least about 95% or more identical thereto, and a light chain comprising SEQ ID NO: 23 or a sequence at least about 95% or more identical thereto.

[0368] In an embodiment, the invention relates to a combination comprising an anti-human ENTPD2 antibody or antigen binding fragment thereof that specifically bind to an epitope in human ENTPD2, wherein the epitope comprises at least one (e.g., at least two, at least three, at least four, at least five, at least six, at least seven, at least eight, at least nine, at least ten, at least eleven, at least twelve, at least thirteen, at least fourteen, at least fifteen, at least twenty) of the following residues: His50, Asp76, Pro78, Gly79, Gly80, Tyr85, Asp87, Asn88, Gly91, Gln94, Ser95, Gly98, Glu101, Gln102, Gln105, Asp106, Arg245, Thr272, Gln273, Leu275, Asp278, Arg298, Ala347, Ala350, Thr351, Arg392, Ala393, Arg394, or Tyr398.

[0369] In an embodiment, the invention further relates to a combination comprising an anti-human ENTPD2 antibody or antigen binding fragment thereof that specifically bind to an epitope in human ENTPD2, wherein the epitope comprises at least one (e.g., at least two, at least three, at least four, at least five, at least six, at least seven, at least eight, at least nine, at least ten, at least eleven, at least twelve, at least thirteen, at least fourteen, at least fifteen, at least twenty) of the following residues: Gly79, Gln250, Leu253, Trp266, Arg268, Gly269, Phe270, Ser271, Thr272, Gln273, Val274, Leu275, Asp278, Arg298, Ser300, Ser302, Gly303, Thr380, Trp381, Ala382, Gly390, Gln391, Arg392, Ala393, Arg394, or Asp397.

[0370] In some embodiments of the combination according to the invention, the HCDR1, HCDR2, HCDR3, LCDR1, LCDR2, and LCDR3 of the anti-human CD73 antibodies or antigen binding fragments thereof are selected from the HCDR1, HCDR2, HCDR3, LCDR1, LCDR2, and LCDR3 sequences provided in Table 2.

[0371] In some embodiments of the combination according to the invention the anti-human CD73 antibody or antigen binding fragment thereof comprises a heavy chain variable region provided in Table 2.

[0372] In some embodiments of the combination according to the invention the anti-human CD73 antibody or antigen binding fragment thereof comprises a light chain variable region provided in Table 2.

[0373] In some embodiments of the combination according to the invention the anti-human CD73 antibody or antigen binding fragment thereof is selected from any one of the following:
[0374] i) an antibody or antigen binding fragment thereof comprising:
[0375] an HCDR1 sequence comprising SEQ ID NO: 363,
[0376] an HCDR2 sequence comprising SEQ ID NO:361,
[0377] an HCDR3 sequence comprising SEQ ID NO: 362,
[0378] an LCDR1 sequence comprising SEQ ID NO: 373,
[0379] an LCDR2 sequence comprising SEQ ID NO: 374, and
[0380] an LCDR3 sequence comprising SEQ ID NO: 375;
[0381] ii) an antibody or antigen binding fragment thereof comprising:
[0382] an HCDR1 sequence comprising SEQ ID NO: 363,
[0383] an HCDR2 sequence comprising SEQ ID NO: 385,
[0384] an HCDR3 sequence comprising SEQ ID NO: 362,
[0385] an LCDR1 sequence comprising SEQ ID NO: 373,
[0386] an LCDR2 sequence comprising SEQ ID NO: 374, and
[0387] an LCDR3 sequence comprising SEQ ID NO: 375;
[0388] iii) an antibody or antigen binding fragment thereof comprising:
[0389] an HCDR1 sequence comprising SEQ ID NO: 397,
[0390] an HCDR2 sequence comprising SEQ ID NO: 395,
[0391] an HCDR3 sequence comprising SEQ ID NO: 396,
[0392] an LCDR1 sequence comprising SEQ ID NO: 407,
[0393] an LCDR2 sequence comprising SEQ ID NO: 408, and
[0394] an LCDR3 sequence comprising SEQ ID NO: 409;
[0395] iv) an antibody or antigen binding fragment thereof comprising:
[0396] an HCDR1 sequence comprising SEQ ID NO: 420,
[0397] an HCDR2 sequence comprising SEQ ID NO: 419,
[0398] an HCDR3 sequence comprising SEQ ID NO: 362,
[0399] an LCDR1 sequence comprising SEQ ID NO: 373,
[0400] an LCDR2 sequence comprising SEQ ID NO: 374, and
[0401] an LCDR3 sequence comprising SEQ ID NO: 375;
[0402] v) an antibody or antigen binding fragment thereof comprising:
[0403] an HCDR1 sequence comprising SEQ ID NO: 431,
[0404] an HCDR2 sequence comprising SEQ ID NO: 430,
[0405] an HCDR3 sequence comprising SEQ ID NO: 396,
[0406] an LCDR1 sequence comprising SEQ ID NO: 407,
[0407] an LCDR2 sequence comprising SEQ ID NO: 408, and
[0408] an LCDR3 sequence comprising SEQ ID NO: 409;
[0409] vi) an antibody or antigen binding fragment thereof comprising:
[0410] an HCDR1 sequence comprising SEQ ID NO: 397,
[0411] an HCDR2 sequence comprising SEQ ID NO: 430,
[0412] an HCDR3 sequence comprising SEQ ID NO: 396,
[0413] an LCDR1 sequence comprising SEQ ID NO: 407,
[0414] an LCDR2 sequence comprising SEQ ID NO: 408, and
[0415] an LCDR3 sequence comprising SEQ ID NO: 409;
[0416] vii) an antibody or antigen binding fragment thereof comprising:
[0417] an HCDR1 sequence comprising SEQ ID NO: 494,
[0418] an HCDR2 sequence comprising SEQ ID NO: 493,
[0419] an HCDR3 sequence comprising SEQ ID NO: 396,
[0420] an LCDR1 sequence comprising SEQ ID NO: 407,
[0421] an LCDR2 sequence comprising SEQ ID NO: 408, and
[0422] an LCDR3 sequence comprising SEQ ID NO: 409;
[0423] viii) an antibody or antigen binding fragment thereof comprising:
[0424] an HCDR1 sequence comprising SEQ ID NO: 494,
[0425] an HCDR2 sequence comprising SEQ ID NO: 503,
[0426] an HCDR3 sequence comprising SEQ ID NO: 396,
[0427] an LCDR1 sequence comprising SEQ ID NO: 407,
[0428] an LCDR2 sequence comprising SEQ ID NO: 408, and
[0429] an LCDR3 sequence comprising SEQ ID NO: 409;
[0430] ix) an antibody or antigen binding fragment thereof comprising:
[0431] an HCDR1 sequence comprising SEQ ID NO: 494,
[0432] an HCDR2 sequence comprising SEQ ID NO: 511,
[0433] an HCDR3 sequence comprising SEQ ID NO: 396,
[0434] an LCDR1 sequence comprising SEQ ID NO: 407,
[0435] an LCDR2 sequence comprising SEQ ID NO: 408, and
[0436] an LCDR3 sequence comprising SEQ ID NO: 409;
[0437] x) an antibody or antigen binding fragment thereof comprising:
[0438] an HCDR1 sequence comprising SEQ ID NO: 520,
[0439] an HCDR2 sequence comprising SEQ ID NO: 519,
[0440] an HCDR3 sequence comprising SEQ ID NO: 362,
[0441] an LCDR1 sequence comprising SEQ ID NO: 373,
[0442] an LCDR2 sequence comprising SEQ ID NO: 374, and
[0443] an LCDR3 sequence comprising SEQ ID NO: 375;
[0444] xi) an antibody or antigen binding fragment thereof comprising:
[0445] an HCDR1 sequence comprising SEQ ID NO: 397,
[0446] an HCDR2 sequence comprising SEQ ID NO: 541,
[0447] an HCDR3 sequence comprising SEQ ID NO: 396,
[0448] an LCDR1 sequence comprising SEQ ID NO: 545,
[0449] an LCDR2 sequence comprising SEQ ID NO: 546, and
[0450] an LCDR3 sequence comprising SEQ ID NO: 547;
[0451] xii) an antibody or antigen binding fragment thereof comprising:
[0452] an HCDR1 sequence comprising SEQ ID NO: 397,
[0453] an HCDR2 sequence comprising SEQ ID NO: 554,
[0454] an HCDR3 sequence comprising SEQ ID NO: 396,
[0455] an LCDR1 sequence comprising SEQ ID NO: 545,
[0456] an LCDR2 sequence comprising SEQ ID NO: 546, and
[0457] an LCDR3 sequence comprising SEQ ID NO: 547;
[0458] xiii) an antibody or antigen binding fragment thereof comprising:
[0459] an HCDR1 sequence comprising SEQ ID NO: 561,
[0460] an HCDR2 sequence comprising SEQ ID NO: 559,
[0461] an HCDR3 sequence comprising SEQ ID NO: 560,
[0462] an LCDR1 sequence comprising SEQ ID NO: 569,
[0463] an LCDR2 sequence comprising SEQ ID NO: 374, and
[0464] an LCDR3 sequence comprising SEQ ID NO: 570;
[0465] xiv) an antibody or antigen binding fragment thereof comprising:
[0466] an HCDR1 sequence comprising SEQ ID NO: 578,
[0467] an HCDR2 sequence comprising SEQ ID NO: 576,
[0468] an HCDR3 sequence comprising SEQ ID NO: 577,
[0469] an LCDR1 sequence comprising SEQ ID NO: 585,
[0470] an LCDR2 sequence comprising SEQ ID NO: 586, and
[0471] an LCDR3 sequence comprising SEQ ID NO: 587;
[0472] xv) an antibody or antigen binding fragment thereof comprising:
[0473] an HCDR1 sequence comprising SEQ ID NO: 596,
[0474] an HCDR2 sequence comprising SEQ ID NO: 594,
[0475] an HCDR3 sequence comprising SEQ ID NO: 595,
[0476] an LCDR1 sequence comprising SEQ ID NO: 604,
[0477] an LCDR2 sequence comprising SEQ ID NO: 408, and
[0478] an LCDR3 sequence comprising SEQ ID NO: 605;
[0479] xvi) an antibody or antigen binding fragment thereof comprising:
[0480] an HCDR1 sequence comprising SEQ ID NO: 420,
[0481] an HCDR2 sequence comprising SEQ ID NO: 611,
[0482] an HCDR3 sequence comprising SEQ ID NO: 612,
[0483] an LCDR1 sequence comprising SEQ ID NO: 373,
[0484] an LCDR2 sequence comprising SEQ ID NO: 374, and
[0485] an LCDR3 sequence comprising SEQ ID NO: 620;
[0486] or
[0487] xvii) an antibody or antigen binding fragment thereof comprising:
[0488] an HCDR1 sequence comprising SEQ ID NO: 626,
[0489] an HCDR2 sequence comprising SEQ ID NO: 624,
[0490] an HCDR3 sequence comprising SEQ ID NO: 625,
[0491] an LCDR1 sequence comprising SEQ ID NO: 373,
[0492] an LCDR2 sequence comprising SEQ ID NO: 374, and
[0493] an LCDR3 sequence comprising SEQ ID NO: 634.

[0494] In a preferred embodiment of the combination according to the invention the anti-human CD73 antibody or antigen binding fragment thereof comprises:
[0495] an HCDR1 sequence comprising SEQ ID NO: 397,
[0496] an HCDR2 sequence comprising SEQ ID NO: 395,
[0497] an HCDR3 sequence comprising SEQ ID NO: 396,
[0498] an LCDR1 sequence comprising SEQ ID NO: 407,
[0499] an LCDR2 sequence comprising SEQ ID NO: 408, and
[0500] an LCDR3 sequence comprising SEQ ID NO: 409.

[0501] In some embodiments of the combination according to the invention the anti-human CD73 antibody or antigen binding fragment thereof is selected from any one of the following:
[0502] i) an antibody or antigen binding fragment thereof comprising a heavy chain variable region (VH) comprising SEQ ID NO: 369 or a sequence at least about 95% or more identical thereto, and a light chain variable region (VL) comprising SEQ ID NO: 380 or a sequence at least about 95% or more identical thereto;
[0503] ii) an antibody or antigen binding fragment thereof comprising a VH comprising SEQ ID NO: 390 or a sequence at least about 95% or more identical thereto, and a VL comprising SEQ ID NO: 380 or a sequence at least about 95% or more identical thereto;
[0504] iii) an antibody or antigen binding fragment thereof comprising a VH comprising SEQ ID NO: 403 or a sequence at least about 95% or more identical thereto, and a VL comprising SEQ ID NO: 414 or a sequence at least about 95% or more identical thereto;
[0505] iv) an antibody or antigen binding fragment thereof comprising a VH comprising SEQ ID NO: 425 or a sequence at least about 95% or more identical thereto, and a VL comprising SEQ ID NO: 380 or a sequence at least about 95% or more identical thereto;
[0506] v) an antibody or antigen binding fragment thereof comprising a VH comprising SEQ ID NO: 436 or a sequence at least about 95% or more identical thereto, and a VL comprising SEQ ID NO: 414 or a sequence at least about 95% or more identical thereto;
[0507] vi) an antibody or antigen binding fragment thereof comprising a VH comprising SEQ ID NO: 443 or a sequence at least about 95% or more identical thereto, and a VL comprising SEQ ID NO: 414 or a sequence at least about 95% or more identical thereto;
[0508] vii) an antibody or antigen binding fragment thereof comprising a VH comprising SEQ ID NO: 499or a sequence at least about 95% or more identical thereto, and a VL comprising SEQ ID NO: 414 or a sequence at least about 95% or more identical thereto;
[0509] viii) an antibody or antigen binding fragment thereof comprising a VH comprising SEQ ID NO: 508 or a sequence at least about 95% or more identical thereto, and a VL comprising SEQ ID NO: 414 or a sequence at least about 95% or more identical thereto;
[0510] ix) an antibody or antigen binding fragment thereof comprising a VH comprising SEQ ID NO: 516 or a sequence at least about 95% or more identical thereto, and a VL comprising SEQ ID NO: 414 or a sequence at least about 95% or more identical thereto;
[0511] x) an antibody or antigen binding fragment thereof comprising a VH comprising SEQ ID NO: 525 or a sequence at least about 95% or more identical thereto, and a VL comprising SEQ ID NO: 380 or a sequence at least about 95% or more identical thereto;
[0512] xi) an antibody or antigen binding fragment thereof comprising a VH comprising SEQ ID NO: 544 or a sequence at least about 95% or more identical thereto, and a VL comprising SEQ ID NO: 553 or a sequence at least about 95% or more identical thereto;
[0513] xii) an antibody or antigen binding fragment thereof comprising a VH comprising SEQ ID NO: 557 or a sequence at least about 95% or more identical thereto, and a VL comprising SEQ ID NO: 553 or a sequence at least about 95% or more identical thereto;
[0514] xiii) an antibody or antigen binding fragment thereof comprising a VH comprising SEQ ID NO: 568 or a sequence at least about 95% or more identical thereto, and a VL comprising SEQ ID NO: 574 or a sequence at least about 95% or more identical thereto;
[0515] xiv) an antibody or antigen binding fragment thereof comprising a VH comprising SEQ ID NO: 584 or a sequence at least about 95% or more identical thereto, and a VL comprising SEQ ID NO: 592 or a sequence at least about 95% or more identical thereto;
[0516] xv) an antibody or antigen binding fragment thereof comprising a VH comprising SEQ ID NO: 603 or a sequence at least about 95% or more identical thereto, and a VL comprising SEQ ID NO: 609 or a sequence at least about 95% or more identical thereto;
[0517] xvi) an antibody or antigen binding fragment thereof comprising a VH comprising SEQ ID NO: 619 or a sequence at least about 95% or more identical thereto, and a VL comprising SEQ ID NO: 622 or a sequence at least about 95% or more identical thereto; or
[0518] xvii) an antibody or antigen binding fragment thereof comprising a VH comprising SEQ ID NO: 633 or a sequence at least about 95% or more identical thereto, and a VL comprising SEQ ID NO: 636 or a sequence at least about 95% or more identical thereto.

[0519] In a preferred embodiment of the combination according to the invention the anti-human CD73 antibody or antigen binding fragment thereof comprises: a VH comprising SEQ ID NO: 403 or a sequence at least about 95% or more identical thereto, and a VL comprising SEQ ID NO: 414 or a sequence at least about 95% or more identical thereto.

[0520] In another preferred embodiment of the combination according to the invention the anti-human CD73 antibody or antigen binding fragment thereof comprises: a VH comprising SEQ ID NO: 403, and a VL comprising SEQ ID NO: 414.

[0521] In some embodiments of the combination according to the invention the anti-human CD73 antibody or antigen binding fragment thereof is selected from any one of the following:
[0522] i) an antibody comprising a heavy chain comprising SEQ ID NO: 371 or a sequence at least about 95% or more identical thereto, and a light chain comprising SEQ ID NO: 382 or a sequence at least about 95% or more identical thereto;
[0523] ii) an antibody comprising a heavy chain comprising SEQ ID NO: 392 or a sequence at least about 95% or more identical thereto, and a light chain comprising SEQ ID NO: 382 or a sequence at least about 95% or more identical thereto;
[0524] iii) an antibody comprising a heavy chain comprising SEQ ID NO: 405 or a sequence at least about 95% or more identical thereto, and a light chain comprising SEQ ID NO: 416 or a sequence at least about 95% or more identical thereto;
[0525] iv) an antibody comprising a heavy chain comprising SEQ ID NO: 427 or a sequence at least about 95% or more identical thereto, and a light chain comprising SEQ ID NO: 382 or a sequence at least about 95% or more identical thereto;
[0526] v) an antibody comprising a heavy chain comprising SEQ ID NO: 438 or a sequence at least about 95% or more identical thereto, and a light chain comprising SEQ ID NO: 416 or a sequence at least about 95% or more identical thereto; or
[0527] vi) an antibody comprising a heavy chain comprising SEQ ID NO: 445 or a sequence at least about 95% or more identical thereto, and a light chain comprising SEQ ID NO: 416 or a sequence at least about 95% or more identical thereto.

[0528] In a preferred embodiment of the combination according to the invention the anti-human CD73 antibody or antigen binding fragment thereof comprises a heavy chain comprising SEQ ID NO: 405 or a sequence at least about 95% or more identical thereto, and a light chain comprising SEQ ID NO: 416 or a sequence at least about 95% or more identical thereto.

[0529] In another preferred embodiment of the combination according to the invention the anti-human CD73 antibody or antigen binding fragment thereof comprises a heavy chain comprising SEQ ID NO: 405, and a light chain comprising SEQ ID NO: 416.

[0530] In another preferred embodiment of the combination according to the invention the anti-human ENTPD2 antibody or antigen binding fragment thereof comprises:
[0531] an HCDR1 sequence comprising SEQ ID NO: 1,
[0532] an HCDR2 sequence comprising SEQ ID NO: 2,
[0533] an HCDR3 sequence comprising SEQ ID NO: 3,
[0534] an LCDR1 sequence comprising SEQ ID NO: 14,
[0535] an LCDR2 sequence comprising SEQ ID NO: 15, and
[0536] an LCDR3 sequence comprising SEQ ID NO: 16 and the anti-human CD73 antibody or antigen binding fragment thereof comprises:
[0537] an HCDR1 sequence comprising SEQ ID NO: 397,
[0538] an HCDR2 sequence comprising SEQ ID NO: 395,
[0539] an HCDR3 sequence comprising SEQ ID NO: 396,
[0540] an LCDR1 sequence comprising SEQ ID NO: 407,
[0541] an LCDR2 sequence comprising SEQ ID NO: 408, and
[0542] an LCDR3 sequence comprising SEQ ID NO: 409.

[0543] In a preferred embodiment of the combination according to the invention the anti-human ENTPD2 antibody or antigen binding fragment thereof comprises a heavy chain variable region (VH) comprising SEQ ID NO: 10 or a sequence at least about 95% or more identical thereto, and a light chain variable region (VL) comprising SEQ ID NO: 21 or a sequence at least about 95% or more identical thereto and the anti-human CD73 antibody or antigen binding fragment thereof comprises a VH comprising SEQ ID NO: 403 or a sequence at least about 95% or more identical thereto, and a VL comprising SEQ ID NO: 414 or a sequence at least about 95% or more identical thereto.

[0544] In another preferred embodiment of the combination according to the invention the anti-human ENTPD2 antibody or antigen binding fragment thereof comprises a heavy chain variable region (VH) comprising SEQ ID NO: 10, and a light chain variable region (VL) comprising SEQ ID NO: 21 and the anti-human CD73 antibody or antigen binding fragment thereof comprises a VH comprising SEQ ID NO: 403, and a VL comprising SEQ ID NO: 414.

[0545] In a preferred embodiment of the combination according to the invention the anti-human ENTPD2 antibody or antigen binding fragment thereof comprises a heavy chain comprising SEQ ID NO: 12 or a sequence at least about 95% or more identical thereto, and a light chain comprising SEQ ID NO: 23 or a sequence at least about 95% or more identical thereto and the anti-human CD73 antibody or antigen binding fragment thereof comprises a heavy chain comprising SEQ ID NO: 405 or a sequence at least about 95% or more identical thereto, and a light chain comprising SEQ ID NO: 416 or a sequence at least about 95% or more identical thereto.

[0546] In another preferred embodiment of the combination according to the invention the anti-human ENTPD2 antibody or antigen binding fragment thereof comprises a heavy chain comprising SEQ ID NO: 12, and a light chain comprising SEQ ID NO: 23 and the anti-human CD73 antibody or antigen binding fragment thereof comprises a heavy chain comprising SEQ ID NO: 405, and a light chain comprising SEQ ID NO: 416.

[0547] In another preferred embodiment of the combination according to the invention the anti-human ENTPD2 antibody or antigen binding fragment thereof comprises anti-ENTPD2 mAb1 and the anti-human CD73 antibody or antigen binding fragment thereof comprises anti-CD73 mAb 373.

[0548] In some embodiments of the combination of the invention, the anti-human ENTPD2 or anti-human CD73 antibodies or antigen binding fragments thereof described herein have an IgG1, IgG2, IgG3 or IgG4 isotype. In some embodiments, the anti-human ENTPD2 antibodies or antigen binding fragments thereof described herein have an IgG1 isotype. In some embodiments, the anti-human CD73 antibodies or antigen binding fragments thereof described herein have an IgG4 isotype. In some embodiments, the antibodies or antigen binding fragments thereof described herein comprise an Fc region selected from an IgG1 Fc region, an IgG2 Fc region, an IgG4 Fc region, or an IgG2/IgG4 hybrid Fc region. In some embodiments, the antibodies or antigen binding fragments thereof described herein comprise an Fc region selected from an IgG1 Fc region. In some embodiments, the antibodies or antigen binding fragments thereof described herein comprise a modified Fc region. In some embodiments, the antibodies or antigen binding fragments thereof described herein comprise a modified Fc region having reduced antibody-dependent cellular cytotoxicity (ADCC) or complement-dependent cytotoxicity (CDC) activity compared to the parent antibody.

[0549] In another aspect of the combination according to the invention, the anti-human ENTPD2 antibodies or antigen binding fragments thereof are those that compete with any antibody or antigen binding fragment provided in Table 1 for binding to human ENTPD2 protein.

[0550] In another aspect of the combination according to the invention, the anti-human ENTPD2 antibodies or antigen binding fragments thereof are those that bind essentially the same ENTPD2 epitope as any antibody or antigen binding fragment provided in Table 1.

[0551] In some embodiments, the anti-human ENTPD2 antibodies or antigen binding fragments thereof described herein bind to human ENTPD2 protein with a dissociation constant (KD) of less than 10 nM, e.g., with a KD of less than 5 nM, or with a KD of less than 3 nM, e.g., as measured by Biacore. In some embodiments, the dissociation constant of the antibodies or antigen binding fragments thereof described herein to human ENTPD2 is measured by Biacore at 25° C.

[0552] In some embodiments, the anti-human ENTPD2 antibodies or antigen binding fragments thereof described herein inhibit human ENTPD2 enzymatic activity by at least 40%, at least 50%, at least 60%, at least 70%, at least 80%, or at least 90%. In some embodiments, the enzymatic activity of human ENTPD2 is measured using an in vitro FRET assay which measures the hydrolysis of ATP to ADP by either recombinant ENTPD2 or ENTPD2 expressed on the surface of cells.

[0553] In some embodiments, the anti-human ENTPD2 antibodies or antigen binding fragments thereof described herein inhibit ENTPD2's ability of hydrolysis of adenosine triphosphate (ATP). In some embodiments, ENTPD2's ability of hydrolysis of ATP is measured using an in vitro FRET assay which measures the hydrolysis of ATP to ADP by either recombinant ENTPD2 or ENTPD2 expressed on the surface of cells.

[0554] In some embodiments, the anti-human ENTPD2 antibodies or antigen binding fragments thereof described herein interfere with ATP binding to ENTPD2 or trap ATP within the catalytic domain of ENTPD2. In some embodiments, ENTPD2's ability of hydrolysis of ATP is measured using an in vitro FRET assay which measures the hydrolysis of ATP to ADP by either recombinant ENTPD2 or ENTPD2 expressed on the surface of cells.

[0555] In some embodiments, the anti-human ENTPD2 or anti-human CD73 antibodies or antigen binding fragments thereof described herein are human or humanized antibodies or fragments thereof.

[0556] Provided herein are nucleic acids encoding an anti-human ENTPD2 antibody or antigen binding fragment thereof described herein. Such nucleic acids can encode polypeptides comprising segments or domains of the ENTPD2 antibodies or antigen binding fragments thereof described herein.

[0557] Also provided are vectors comprising such nucleic acids encoding an anti-human ENTPD2 antibody or antigen binding fragment thereof described herein. In some embodiments, the vector is selected from a DNA vector, a RNA vector, a plasmid, a cosmid, or a viral vector. In some embodiments, the vector is a viral vector based on any one of the following viruses: lentivirus, adenovirus, adeno-associated virus (AAV), Herpes Simplex Virus (HSV), parvovirus, retrovirus, vaccinia virus, Sinbis virus, influenza virus, reovirus, Newcastle disease virus (NDV), measles virus, vesicular stomatitis virus (VSV), poliovirus, poxvirus, Seneca Valley virus, coxsackievirus, enterovirus, myxoma virus, or maraba virus. In some embodiments, the vector is an AAV vector. In some embodiments, the vector is a lentiviral vector. In some embodiments, the vector further comprises a promoter, e.g., a tissue-specific promoter. In some embodiments, the vector further comprises a detectable marker.

[0558] Also provided herein are cells comprising a nucleic acid or set of nucleic acids encoding an anti-human ENTPD2 antibody or antigen binding fragment thereof described herein or a vector comprising such a nucleic acid or set of nucleic acids.

[0559] Provided herein are methods of producing an anti-human ENTPD2 antibody or antigen binding fragment thereof by culturing a cell comprising a nucleic acid or sets of nucleic acids encoding an anti-human ENTPD2 antibody or antigen binding fragment thereof or a vector comprising such a nucleic acid or sets of nucleic acids, and collecting the antibody or antigen binding fragment thereof from the culture medium.

[0560] Another aspect according to the invention relates to pharmaceutical compositions comprising the combination according to the invention comprising an anti-human ENTPD2 antibody or antigen binding fragment thereof described herein and an anti-human CD73 antibody or antigen binding fragment thereof described herein and a pharmaceutically acceptable carrier.

[0561] A further aspect according to the invention relates to the combination of the invention as described herein, or the pharmaceutical composition as described herein, for use as a medicament.

[0562] Another aspect according to the invention relates to the combination of the invention as described herein, or the pharmaceutical composition as described herein, for use in the treatment of cancer.

[0563] A further aspect according to the invention relates to the use of the combination of the invention as described herein, or the pharmaceutical composition as described herein, in the manufacture of a medicament for the treatment of a cancer.

[0564] In an embodiment the cancer is an ENTPD2+ cancer. In another embodiment, the cancer expresses PD-L1. In another embodiment the cancer is a solid tumor, such as an advanced solid tumor. Preferably the cancer is selected from the group consisting of MSS colorectal cancer (CRC), cholangiocarcinoma (intrahepatic or extrahepatic), pancreatic cancer, esophageal cancer, esophageal gastric junction (EGJ) cancer, and gastric cancer.

[0565] In an embodiment according to the invention the combination, or the pharmaceutical composition, is administered to the subject through an intravenous, intratumoral or subcutaneous route.

[0566] In another embodiment according to the invention the combination, or the pharmaceutical composition is administered with at least one additional therapeutic agent or procedure. In yet another embodiment of the invention the combination, or the pharmaceutical composition is adminsitered with at least two additional therapeutic agents or procedures.

[0567] In an embodiment the additional therapeutic agent is a PD-1 inhibitor, e.g., an anti-PD-1 antibody. In an embodiment the PD-1 inhibitor is selected from Spartalizumab, Nivolumab, Pembrolizumab, Pidilizumab, MEDI0680, REGN2810, TSR-042, PF-06801591, and AMP-224. In a preferred embodiment the additional therapeutic agent is Spartalizumab.

[0568] In another embodiment the additional therapeutic agent is a A2aR antagonist, which is selected from the group consisting of NIR178, CPI444N81444, AZD4635/HTL-1071, Vipadenant, GBV-2034, AB928, Theophylline, Istradefylline, Tozadenant/SYN-115, KW-6356, ST-4206, and Preladenant/SCH 420814. In a preferred embodiment the additional therapeutic agent is NIR178.

[0569] Another aspect according to the invention relates to methods of treating a cancer in a subject in need thereof by administering to the subject the combination according to the invention comprising a therapeutically effective amount of an anti-human ENTPD2 antibody or antigen binding fragment described herein and a therapeutically effective amount of an anti-human CD73 antibody or antigen binding fragment thereof described herein. In some embodiments, the antibodies or antigen binding fragments thereof in the combination are administered to the subject through an intravenous, intratumoralor subcutaneous route.

[0570] In an embodiment the cancer is an ENTPD2+ cancer. In another embodiment, the cancer expresses PD-L1. In some embodiments, the cancer expresses PD-L1. In another embodiment the cancer is a solid tumor, such as an advanced solid tumor. Preferably the cancer is selected from the group consisting of MSS colorectal cancer (CRC), cholangiocarcinoma (intrahepatic or extrahepatic), pancreatic cancer, esophageal cancer, esophageal gastric junction (EGJ) cancer, and gastric cancer.

[0571] In another aspect, the invention relates to methods of stimulating an immune response in a subject by administering to the subject the combination of the invention as described herein or a pharmaceutical composition as described herein, in an amount effective to stimulate the immune response.

[0572] In some embodiments, such methods can further include administration of at least one additional therapeutic agent to the subject.

[0573] In some embodiments, such methods can further include administration of at least two additional therapeutic agents to the subject.

[0574] In an embodiment the at least one additional therapeutic agent is a PD-1 inhibitor, e.g., an anti-PD-1 antibody. In an embodiment the PD-1 inhibitor is selected from Spartalizumab, Nivolumab, Pembrolizumab, Pidilizumab, MEDI0680, REGN2810, TSR-042, PF-06801591, and AMP-224. In a preferred embodiment the additional therapeutic agent is Spartalizumab.

[0575] In another embodiment the additional therapeutic agent is a A2aR antagonist, which is selected from the group consisting of NIR178, CPI444N81444, AZD4635/HTL-1071, Vipadenant, GBV-2034, AB928, Theophylline, Istradefylline, Tozadenant/SYN-115, KW-6356, ST-4206, and Preladenant/SCH 420814. In a preferred embodiment the additional therapeutic agent is NIR178.

[0576] In another embodiment the additional therapeutic agent is a PD-L1 inhibitor, e.g., an anti-PD-L1 antibody. In a further embodiment the at least one additional therapeutic agent is a TGF beta inhibitor, e.g., an anti-TGF beta antibody.

[0577] In one embodiment of the invention the anti-human ENTPD2 antibody or antigen binding fragment thereof and/or the anti-human CD73 antibody or antigen binding fragment thereof is administered to the subject intravenously as a 1 hr infusion (up to 2 hours if clinically indicated).

[0578] In another embodiment of the invention, the anti-human ENTPD2 antibody or antigen binding fragment thereof and/or the anti-human CD73 antibody or antigen binding fragment thereof is administered to the subject at 10 mg, 30 mg, 100 mg, 150 mg, 300 mg, 400mg, 600 mg, 800 mg, 1200 mg, or 2400 mg once every two or four weeks.

[0579] In a further another embodiment of the invention, the at least one additional therapeutic agent is administered which is Spartalizumab, wherein Spartalizumab is administered to the subject at 400 mg once every four weeks.

[0580] In a further another embodiment of the invention, the at least one additional therapeutic agent is administered which is NIR178, wherein NIR178 is administered to the subject at 80 mg or 160 mg twice daily (BID) continuously.

[0581] All publications, patents, and accession numbers mentioned herein are hereby incorporated by reference in their entirety as if each individual publication or patent was specifically and individually indicated to be incorporated by reference.

### BRIEF DESCRIPTION OF THE DRAWINGS

[0582] FIG. 1A depicts ENTPD2 expression across representative cancer cell lines as determined by flow cytometry. FIG. 1B is a table (Table 20) showing ENTPD2 receptor density across representative cancer cell lines.

[0583] FIG. 2 depicts representative IHC staining images of ENTPD2 in formalin-fixed paraffin-embedded primary colorectal, esophageal and ovarian tumor tissues.

[0584] FIG. 3A shows the amino acid sequence of anti-human ENTPD2 FAb22 heavy chain (SEQ ID NO: 330) and light chain (SEQ ID NO: 334) with the CDRs underlined (as defined by Kabat), and residues located at the antibody-antigen interface labeled for each Fab as (*). FIG. 3B shows the amino acid sequence of anti-human ENTPD2 FAb23 heavy chain (SEQ ID NO: 336) and light chains (SEQ ID NO: 239) with the CDRs underlined (as defined by Kabat), and residues located at the antibody-antigen interface labeled with (*). FIG. 3C shows the amino acid sequence of the anti-mouse ENTPD2 FAb24 heavy chain (SEQ ID NO: 338) and light chains (SEQ ID NO: 340) with the CDRs underlined (as defined by Kabat), and residues located at the antibody-antigen interface labeled with (*).

[0585] FIG. 4A shows the amino acid sequence of recombinant human ENTPD2 (residues 29-462, Y350A mutant) used in crystallographic studies (SEQ ID NO: 691), with the secondary structure elements shown below the amino acid sequence. Bars represent alpha-helices and arrows represent beta-strands. Unlabeled arrows and bars from sequence formatting breaks are contiguous to preceding structural elements labeled. Unstructured regions are unmarked. Soluble extracellular domain of human ENTPD2 spans residues 29-462. The construct utilizes an N-terminal GP67 secretion signal peptide (first 38 residues highlighted in gray) with the signal peptide cleavage site after last residue, and a C-terminal hexahistidine (SEQ ID NO: 639) metal affinity tag to facilitate purification. Asn129, Asn294, Asn378 and Asn443 are predicted N-linked glycosylation sites for which glycosylation is observed in crystal structures and shown in italics. Asn64 is also a predicted N-linked glycosylation site not observed in these crystal structures. Residues located at the antigen-Fab interface for the FAb22 and FAb23 complexes are indicated by (*) and (:) symbols, respectively, below the amino acid sequence. FIG. 4B shows the amino acid sequence of recombinant murine ENTPD2 (residues 29-462) used in crystallography studies (SEQ ID NO: 692), with the secondary structure elements shown below the amino acid sequence. The bars represent alpha-helices and arrows represent beta-strands. Unlabeled arrows and bars from line breaks are contiguous to preceding structural elements labeled. Unstructured regions are unmarked. Mature murine ENTPD2 starts from Thr29. The construct utilizes an N-terminal GP67 secretion signal peptide (residues 1-38), with the signal peptide cleavage site after residue 38, and a C-terminal hexahistidine (SEQ ID NO: 639) metal affinity tag to facilitate purification. Asn129, Asn294, Asn378 and Asn443 are potential N-linked glycosylation sites shown in italics. Residues positioned at the antigen-FAb24 interface are indicated by (#) symbol beneath the amino acid sequence.

[0586] FIG. 5A shows a cartoon depiction of the human ENTPD2 ectodomain apo crystal structure with residues 33-453 shown. Two views are rotated by 90 degrees. Consecutive secondary structural elements are labeled. Disulfides are shown as sticks. The amino- and carboxy-termini are labeled NT and CT, respectively. The membrane proximal lobe contains both N- and C-termini (subdomainl: Pro36-Ser161 and Lys427-Phe461) and is shaded darker than the membrane distal lobe (subdomain 2: Gly162-Gln426). Substrate ATP binds deep within the interlobe cleft. The location of the ATP binding site is illustrated in FIG. 5B. Shown is the ATP analog AMP-PNP superposed in the human ENTPD2 active site from the rat ENTPD2 co-structure (PDB 3CJA).

[0587] FIG. 6 illustrates an overview of anti-human ENTPD2 FAb22 in complex with human ENTPD2. Two views are shown 90 degrees apart. AMP-PNP is modeled in the ENTPD2 active site based upon superposition with the rat ENTPD2 co-structure PDB 3CJA. The heavy chain of the Fab is shaded darker.

[0588] FIG. 7 illustrates an overview of anti-human ENTPD2 FAb23 in complex with human ENTPD2. Two views are shown 90 degrees apart. AMP-PNP is modeled in the ENTPD2 active site based upon superposition with the rat ENTPD2 co-structure PDB 3CJA. The heavy chain of the Fab is shaded darker.

[0589] FIG. 8 illustrates an overview of anti-murine ENTPD2 FAb24 in complex with mouse ENTPD2. AMP-PNP is modeled in the ENTPD2 active site based upon superposition with the rat ENTPD2 co-structure PDB 3CJA. The heavy chain of the Fab is shaded darker.

[0590] FIG. 9 is a plot illustrating long-term efficacy with anti-mouse ENTPD2 mAb13 in combination with anti-PD-1 Ab in the syngeneic B16LM3 tumor model.

[0591] FIGS. 10A-10C are graphs illustrating efficacy with anti-mouse ENTPD2 mAb13 in combination with anti-PD-1 Ab in the syngeneic B16F10 tumor model, associated with increased influx of activated CD8 and CD4 T helper cells at the tumor site on day 8 post treatment.

[0592] FIGS. 11A-11B depict characterization of the human ENTPD2 engineered model B16LM3 clone B5, illustrating expression of human ENTPD2 by FACS in vitro and sustainability of human ENTPD2 expression in tumors in vivo by IHC with the Novus anti-human CD39L1 Ab (1:40 dilution).

[0593] FIGS. 12A-12B are graphs illustrating dose response efficacy of anti-human ENTPD2 mAb1 and mAb6 in combination with anti-PD-1 Ab in the human ENTPD2 engineered B16LM3 clone B5 model.

[0594] FIGS. 13A-13B are dot plots showing plasma IL-1b (FIG. 13A) and MCP-1 (FIG. 13B) levels after treatment with anti-human ENTPD2 mAb1 or an isotype control in the human ENTPD2 engineered B16LM3 clone B5 xenograft model in C57BL/6 mice. FIGS. 13C-13D are dot plots showing IL-1beta (FIG. 13C) and MCP-1 (FIG. 13D) levels in tumor after treatment with anti-human ENTPD2 mAb1 or an isotype control in the human ENTPD2 engineered B16LM3 clone B5 xenograft model in C57BL/6 mice.

[0595] FIG. 14 is a graph showing in vivo efficacy of anti-ENTPD2 mAb1 in combination with A2AR antagonist NIR178 in the human ENTPD2 engineered B16LM3 xenograft model in C57BL/6 mice.

[0596] FIG. 15 is a graph showing representative activity of anti-ENTPD2 Abs in the biochemical human ENTPD2 functional assay. Anti-human ENTPD2 mAb1, mAb17, mAb19, and mAb21 potently inhibit the catalytic activity of the recombinant human ENTPD2.

[0597] FIGS. 16A-16B depicts representative activity of anti-human ENTPD2 Abs in the human or cyno ENTPD2 NIH/3T3 or RKO cell-based functional assay.

[0598] FIG. 17 depicts graph illustrating in vitro functional activity of anti-mouse ENTPD2 mAb13, mAb14, mAb15 in the mouse ENTPD2 NIH/3T3 cell-based functional assay.

[0599] FIG. 18 depicts graph illustrating anti-ENTPD2 mAb1 increases FcγR IIIa signaling in a Jurkat-NFAT-V158 reporter gene assay.

[0600] FIG. 19 depicts graph illustrating plasma concentration-time profiles of anti-ENTPD2 mAb1 after intravenous administration to male cynomolgus monkeys on day 1 (solid line) and day 15 (dashed line).

[0601] FIG. 20 depicts graph illustrating the study design of the FIH, open-label, phase I/Ib, multi-center study.

[0602] FIG. 21 depicts graph illustrating a study flow diagram of anti-ENTPD2 mAb1 Q2W, biopsies.

[0603] FIG. 22 depicts graph illustrating a study flow diagram of anti-ENTPD2 mAb1 Q2W, Spartalizumab Q4W, biopsies.

[0604] FIG. 23 depicts graph illustrating a study flow diagram of anti-ENTPD2 mAb1 Q2W, NIR178 BID, biopsies.

[0605] FIG. 24 depicts graph illustrating a study flow diagram of anti-ENTPD2 mAb1 Q2W, anti-CD73 Ab Q2W, biopsies.

[0606] FIG. 25 depicts graph illustrating a comparison of ENTPD2 expression in tumor (light grey) and (dark grey) normal tissue. Tumor data obtained from The Cancer Genome Atlas and normal tissue data from the Genotype-Tissue Expression database. Figure and expression comparisons were generated using GEPIA (Tang, Z. et al. (2017) GEPIA: a web server for cancer and normal gene expression profiling and interactive analyses. Nucleic Acids Res, 10.1093/nar/gkx247).

[0607] FIG. 26 depicts graph illustrating analysis of TCGA data sets has shown that A2AR and CD39 RNA expression correlated with an immune signature whereas ENTPD2 is anti-correlated with immune signatures. CD73 is expressed in both immune and tumor cells.

[0608] FIG. 27 depicts characterization of the mouse ENTPD2 engineered model 4T1 clone 45, illustrating expression of mouse ENTPD2 by FACS in vitro.

[0609] FIG. 28 depicts a graph illustrating efficacy of anti-ENTPD2 mAb15 in combination with anti-CD73 mAb 350 in the mouse ENTPD2 engineered 4T1 clone 45 model.

[0610] FIG. 29 depicts the impact of anti-ENTPD2 mAb15 on ENTPD2 expression on tumor cells.

[0611] FIGS. 30A-30D depict the impact of the combination of anti-ENTPD2 mAb15 and anti-CD73 mAb 350 on the tumor infiltrate on Day 12 post treatment.

[0612] FIGS. 31A-31D depict the impact of the combination of anti-ENTPD2 mAb15 and anti-CD73 mAb 350 on serum cytokines and markers of inflammation 24 hrs post treatment.

### DETAILED DESCRIPTION

[0613] Provided herein are combination therapies comprising an antibody or antigen-binding fragment thereof that specifically binds to the ectoenzyme ectonucleoside triphosphate diphosphohydrolase 2 (ENTPD2) and an antibody or antigen-binding fragment thereof that specifically binds to CD73 (Cluster of Differentiation 73). Such combinations are useful for treating ENTPD2-associated diseases, such as a cancer.

[0614] Definitions

[0615] As used in the specification and claims, the singular form “a”, “an” and “the” include plural references unless the context clearly dictates otherwise. For example, the term “a cell” includes a plurality of cells, including mixtures thereof.

[0616] Throughout this specification and the claims which follow, unless the context requires otherwise, the word “comprise”, and variations such as “comprises” and “comprising”, are used herein in their open-ended and non-limiting sense unless otherwise noted.

[0617] When used herein “consisting of” excludes any element, step, or ingredient not specified in the aspect, embodiment and/or claim element. When used herein, “consisting essentially of” does not exclude materials or steps that do not materially affect the basic and novel characteristics of the aspect, embodiment and/or claim.

[0618] In each instance herein any of the terms “comprising”, “consisting essentially of” and “consisting of” may be replaced with either of the other two terms.

[0619] All numerical designations, e.g., pH, temperature, time, concentration, and molecular weight, including ranges, are approximations which are varied (+) or (−) by increments of 0.1. It is to be understood, although not always explicitly stated that all numerical designations are preceded by the term “about”. It also is to be understood, although not always explicitly stated, that the reagents described herein are merely examples and that equivalents of such are known in the art.

[0620] As used herein, ectonucleoside triphosphate diphosphohydrolase 2 (ENTPD2) (also known as CD39 Antigen-Like 1, CD39-like-1, CD39L1, Ecto-ATP Diphosphohydrolase 2, ecto-ATPase, Ecto-ATPase 2, Ecto-ATPDase 2, NTPDase-2, NTPDase 2) refers to the type 2 enzyme of the ecto-nucleoside triphosphate diphosphohydrolase family (E-NTPDase), which are a family of ecto-nucleosidases that hydrolyze 5′-triphosphates. The ENTPD2 enzyme is encoded by the gene ENTPD2. The human ENTPD2 gene is mapped to chromosomal location 9q34.3, and the genomic sequence of human ENTPD2 gene can be found in GenBank at NC_000009.12. The mRNA and protein sequences of the ENTPD2 human transcript variants can be found in GenBank with the following Accession Nos:

```
Isoform1: NM_203468.2 (mRNA) → NP_982293.1 (protein with 495 aa);
Isoform2: NM_001246.3 (mRNA) → NP_001237.1 (protein with 472 aa);
Ectonucleoside triphosphate diphosphohydrolase 2 isoform 1 [Homo sapiens,
NP_982293.1]
(SEQ ID NO: 291)
MAGKVRSLLPPLLLAAAGLAGLLLLCVPTRDVREPPALKYGIVLDAGSSHTSMFIYKWPADKENDTGIVGQHS
SCDVPGGGISSYADNPSGASQSLVGCLEQALQDVPKERHAGTPLYLGATAGMRLLNLTNPEASTSVLMAVTHT
LTQYPFDFRGARILSGQEEGVFGWVTANYLLENFIKYGWVGRWFRPRKGTLGAMDLGGASTQITFETTSPAED
RASEVQLHLYGQHYRVYTHSFLCYGRDQVLQRLLASALQTHGFHPCWPRGFSTQVLLGDVYQSPCTMAQRPQN
FNSSARVSLSGSSDPHLCRDLVSGLFSFSSCPFSRCSFNGVFQPPVAGNFVAFSAFFYTVDFLRTSMGLPVAT
LQQLEAAAVNVCNQTWAQLQARVPGQRARLADYCAGAMFVQQLLSRGYGFDERAFGGVIFQKKAADTAVGWAL
GYMLNLTNLIPADPPGLRKGTDFSSWVVLLLLFASALLAALVLLLRQVHSAKLPSTI
Homo sapiens ectonucleoside triphosphate diphosphohydrolase 2 (ENTPD2),
transcript variant 1, mRNA [NM_203468.2]
(SEQ ID NO: 292)
      1 ggctccccgc actctccggg tccacgcatc gtcctcccgc gcgcccgccc gcccatggcc
    61 gggaaggtgc ggtcactgct gccgccgctg ctgctggccg ccgcgggcct cgccggcctc
  121 ctactgctgt gcgtccccac ccgcgacgtc cgggagccgc ccgccctcaa gtatggcatc
  181 gtcctggacg ctggttcttc acacacgtcc atgtttatct acaagtggcc ggcagacaag
  241 gagaacgaca caggcattgt gggccagcac agctcctgtg atgttccagg tgggggcatc
  301 tccagctatg cagacaaccc ttctggggcc agccagagtc ttgttggatg cctcgaacag
  361 gcgcttcagg atgtgcccaa agagagacac gcgggcacac ccctctacct gggagccaca
  421 gcgggtatgc gcctgctcaa cctgaccaat ccagaggcct cgaccagtgt gctcatggca
  481 gtgactcaca cactgaccca gtaccccttt gacttccggg gtgcacgcat cctctcgggc
  541 caggaagagg gggtgtttgg ctgggtgact gccaactacc tgctggagaa cttcatcaag
  601 tacggctggg tgggccggtg gttccggcca cggaagggga cactgggggc catggacctg
  661 gggggtgcct ctacccagat cacttttgag acaaccagtc cagctgagga cagagccagc
  721 gaggtccagc tgcatctcta cggccagcac taccgagtct acacccacag cttcctctgc
  781 tatggccgtg accaggtcct ccagaggctg ctggccagcg ccctccagac ccacggcttc
  841 cacccctgct ggccgagggg cttttccacc caagtgctgc tcggggatgt gtaccagtca
  901 ccatgcacca tggcccagcg gccccagaac ttcaacagca gtgccagggt cagcctgtca
  961 gggagcagtg acccccacct ctgccgagat ctggtttctg ggctcttcag cttctcctcc
1021 tgccccttct cccgatgctc tttcaatggg gtcttccagc ccccagtggc tgggaacttt
1081 gtggccttct ctgccttctt ctacactgtg gactttttgc ggacttcgat ggggctgccc
1141 gtggccaccc tgcagcagct ggaggcagcc gcagtgaatg tctgcaacca gacctgggct
1201 cagctgcaag ctcgggtgcc agggcaacgg gcccgcctgg ccgactactg cgccggggcc
1261 atgttcgtgc agcagctgct gagtcgcggc tacggcttcg acgagcgcgc cttcggcggc
1321 gtgatcttcc agaagaaggc cgcggacact gcagtgggct gggcgctcgg ctacatgctg
1381 aacctgacca acctgatccc cgccgacccg ccggggctgc gcaagggcac agacttcagc
1441 tcctgggtcg tcctcctgct gctcttcgcc tccgcgctcc tggctgcgct tgtcctgctg
1501 ctgcgtcagg tgcactccgc caagctgcca agcaccattt aggggccgac gggggcagct
1561 gccccatccc tcccccaacc cctgtatccc caccccgtac tcccacccct cccacaaccc
1621 ctgtacctcc cacccctgta tccccacccc tccacccacc cctctcccaa cctctctccc
1681 cgcccctgta tcctgcattc ctccacccac cctctatccc ccaccgctcc accccaccac
1741 tgtcttctcc atccttccac cccaccctca gcgtctctgc ccctaaggca gcccaggaaa
1801 taggaactga gactctggta cccacaggag cctgggtggg caaagagcgc tcaatccagc
1861 tccttgaacc cctccagccc gcttcagcct gggcatcact gcaggccccg tgctcctcct
1921 cctcctcctc agggctgggt ctccagagag tggggccttg gtcctgagaa tcagccctta
1981 gaggctcctt ctgtgtagtc tgggtctgta ctggggaggg tcacagccca cgggctggca
2041 gccagcccag cacctacttg taaaaatttt gtaataaaaa gtttttccta gagacgtgaa
2101 aaaaaaaaaa aaaaaaaaaa aaaaaaaaaa aaaaaaaaaa aaaaaaaaaa aaaaaa
Ectonucleoside triphosphate diphosphohydrolase 2 isoform 2 [Homo sapiens,
NP_001237.1]
(SEQ ID NO: 293)
MAGKVRSLLPPLLLAAAGLAGLLLLCVPTRDVREPPALKYGIVLDAGSSHTSMFIYKWPADKENDTGIVGQHS
SCDVPGGGISSYADNPSGASQSLVGCLEQALQDVPKERHAGTPLYLGATAGMRLLNLTNPEASTSVLMAVTHT
LTQYPFDFRGARILSGQEEGVFGWVTANYLLENFIKYGWVGRWFRPRKGTLGAMDLGGASTQITFETTSPAED
RASEVQLHLYGQHYRVYTHSFLCYGRDQVLQRLLASALQTHGFHPCWPRGFSTQVLLGDVYQSPCTMAQRPQN
FNSSARVSLSGSSDPHLCRDLVSGLFSFSSCPFSRCSFNGVFQPPVAGNFVAFSAFFYTVDFLRTSMGLPVAT
LQQLEAAAVNVCNQTWAQQLLSRGYGFDERAFGGVIFQKKAADTAVGWALGYMLNLTNLIPADPPGLRKGTDF
SSWVVLLLLFASALLAALVLLLRQVHSAKLPSTI
Homo sapiens ectonucleoside triphosphate diphosphohydrolase 2 (ENTPD2),
transcript variant 2, mRNA [NM_001246.3]
(SEQ ID NO: 294)
        1 ggctccccgc actctccggg tccacgcatc gtcctcccgc gcgcccgccc gcccatggcc
      61 gggaaggtgc ggtcactgct gccgccgctg ctgctggccg ccgcgggcct cgccggcctc
    121 ctactgctgt gcgtccccac ccgcgacgtc cgggagccgc ccgccctcaa gtatggcatc
    181 gtcctggacg ctggttcttc acacacgtcc atgtttatct acaagtggcc ggcagacaag
    241 gagaacgaca caggcattgt gggccagcac agctcctgtg atgttccagg tgggggcatc
    301 tccagctatg cagacaaccc ttctggggcc agccagagtc ttgttggatg cctcgaacag
    361 gcgcttcagg atgtgcccaa agagagacac gcgggcacac ccctctacct gggagccaca
    421 gcgggtatgc gcctgctcaa cctgaccaat ccagaggcct cgaccagtgt gctcatggca
    481 gtgactcaca cactgaccca gtaccccttt gacttccggg gtgcacgcat cctctcgggc
    541 caggaagagg gggtgtttgg ctgggtgact gccaactacc tgctggagaa cttcatcaag
    601 tacggctggg tgggccggtg gttccggcca cggaagggga cactgggggc catggacctg
    661 gggggtgcct ctacccagat cacttttgag acaaccagtc cagctgagga cagagccagc
    721 gaggtccagc tgcatctcta cggccagcac taccgagtct acacccacag cttcctctgc
    781 tatggccgtg accaggtcct ccagaggctg ctggccagcg ccctccagac ccacggcttc
    841 cacccctgct ggccgagggg cttttccacc caagtgctgc tcggggatgt gtaccagtca
    901 ccatgcacca tggcccagcg gccccagaac ttcaacagca gtgccagggt cagcctgtca
    961 gggagcagtg acccccacct ctgccgagat ctggtttctg ggctcttcag cttctcctcc
  1021 tgccccttct cccgatgctc tttcaatggg gtcttccagc ccccagtggc tgggaacttt
  1081 gtggccttct ctgccttctt ctacactgtg gactttttgc ggacttcgat ggggctgccc
  1141 gtggccaccc tgcagcagct ggaggcagcc gcagtgaatg tctgcaacca gacctgggct
  1201 cagcagctgc tgagtcgcgg ctacggcttc gacgagcgcg ccttcggcgg cgtgatcttc
  1261 cagaagaagg ccgcggacac tgcagtgggc tgggcgctcg gctacatgct gaacctgacc
  1321 aacctgatcc ccgccgaccc gccggggctg cgcaagggca cagacttcag ctcctgggtc
  1381 gtcctcctgc tgctcttcgc ctccgcgctc ctggctgcgc ttgtcctgct gctgcgtcag
  1441 gtgcactccg ccaagctgcc aagcaccatt taggggccga cgggggcagc tgccccatcc
  1501 ctcccccaac ccctgtatcc ccaccccgta ctcccacccc tcccacaacc cctgtacctc
  1561 ccacccctgt atccccaccc ctccacccac ccctctccca acctctctcc ccgcccctgt
  1621 atcctgcatt cctccaccca ccctctatcc cccaccgctc caccccacca ctgtcttctc
  1681 catccttcca ccccaccctc agcgtctctg cccctaaggc agcccaggaa ataggaactg
  1741 agactctggt acccacagga gcctgggtgg gcaaagagcg ctcaatccag ctccttgaac
  1801 ccctccagcc cgcttcagcc tgggcatcac tgcaggcccc gtgctcctcc tcctcctcct
  1861 cagggctggg tctccagaga gtggggcctt ggtcctgaga atcagccctt agaggctcct
  1921 tctgtgtagt ctgggtctgt actggggagg gtcacagccc acgggctggc agccagccca
  1981 gcacctactt gtaaaaattt tgtaataaaa agtttttcct agagacgtga aaaaaaaaaa
[1001] aaaaaaa aaaaaaaaaa aaaaaaaaaa aaaaaaaaaa aaaaaaa
```

[0621] As used herein, human ENTPD2 protein also encompasses proteins that have over its full length at least about 70%, 71%, 72%, 73%, 74%, 75%, 76%, 77%, 78%, 79%, 80%, 81%, 82%, 83%, 84%, 85%, 86%, 87%, 88%, 89%, 90%, 91%, 92%, 93%, 94%, 95%, 96%, 97%, 98%, 99% or 100% sequence identity with any one of the ENTPD2 isoforms. The sequences of murine, Cynomolgus monkey, and other animal ENTPD2 proteins are known in the art.

[0622] The term “antibody”, as used herein, refers to a protein, or polypeptide sequence derived from an immunoglobulin molecule that specifically binds to an antigen. Antibodies can be polyclonal or monoclonal, multiple or single chain, or intact immunoglobulins, and may be derived from natural sources or from recombinant sources. For example, a naturally occurring IgG antibody can be a glycoprotein comprising at least two heavy (H) chains and two light (L) chains inter-connected by disulfide bonds. Each heavy chain is comprised of a heavy chain variable region (abbreviated herein as VH) and a heavy chain constant region. The heavy chain constant region is comprised of three domains, CH1, CH2 and CH3. Each light chain is comprised of a light chain variable region (abbreviated herein as VL) and a light chain constant region. The light chain constant region is comprised of one domain, CL. The VH and VL regions can be further subdivided into regions of hypervariability, termed complementarity determining regions (CDR), interspersed with regions that are more conserved, termed framework regions (FR). Each VH and VL is composed of three CDRs and four FRs arranged from amino-terminus to carboxyl-terminus in the following order: FR1, CDR1, FR2, CDR2, FR3, CDR3, FR4. The variable regions of the heavy and light chains contain a binding domain that interacts with an antigen. The constant regions of the antibodies may mediate the binding of the immunoglobulin to host tissues or factors, including various cells of the immune system (e.g., effector cells) and the first component (Clq) of the classical complement system. An antibody can be a monoclonal antibody, human antibody, humanized antibody, camelised antibody, or chimeric antibody. The antibodies can be of any isotype (e.g., IgG, IgE, IgM, IgD, IgA and IgY), class (e.g., IgG1, IgG2, IgG3, IgG4, IgA1 and IgA2) or subclass.

[0623] The term “antibody fragment” or “antigen-binding fragment” refers to at least one portion of an antibody, that retains the ability to specifically interact with (e.g., by binding, steric hinderance, stabilizing/destabilizing, spatial distribution) an epitope of an antigen. Examples of antibody fragments include, but are not limited to, Fab, Fab′, F(ab′)2, Fv fragments, scFv antibody fragments, disulfide-linked Fvs (sdFv), a Fd fragment consisting of the VH and CH1 domains, linear antibodies, single domain antibodies such as sdAb (either VL or VH), camelid VHH domains, multi-specific antibodies formed from antibody fragments such as a bivalent fragment comprising two Fab fragments linked by a disulfide bridge at the hinge region, and an isolated CDR or other epitope binding fragments of an antibody. An antigen binding fragment can also be incorporated into single domain antibodies, maxibodies, minibodies, nanobodies, intrabodies, diabodies, triabodies, tetrabodies, v-NAR and bis-scFv (see, e.g., Hollinger and Hudson, Nature Biotechnology 23:1126-1136, 2005). Antigen binding fragments can also be grafted into scaffolds based on polypeptides such as a fibronectin type III (Fn3) (see U.S. Pat. No. 6,703,199, which describes fibronectin polypeptide minibodies). The term “scFv” refers to a fusion protein comprising at least one antibody fragment comprising a variable region of a light chain and at least one antibody fragment comprising a variable region of a heavy chain, wherein the light and heavy chain variable regions are contiguously linked, e.g., via a synthetic linker, e.g., a short flexible polypeptide linker, and capable of being expressed as a single chain polypeptide, and wherein the scFv retains the specificity of the intact antibody from which it is derived. Unless specified, as used herein an scFv may have the VL and VH variable regions in either order, e.g., with respect to the N-terminal and C-terminal ends of the polypeptide, the scFv may comprise VL-linker-VH or may comprise VH-linker-VL.

[0624] The terms “complementarity determining region” or “CDR”, as used herein, refer to the sequences of amino acids within antibody variable regions which confer antigen specificity and binding affinity. For example, in general, there are three CDRs in each heavy chain variable region (e.g., HCDR1, HCDR2, and HCDR3) and three CDRs in each light chain variable region (e.g., LCDR1, LCDR2, and LCDR3). The precise amino acid sequence boundaries of a given CDR can be determined using any one of a number of well-known schemes, including those described by Kabat et al. (1991), “Sequences of Proteins of Immunological Interest,” 5th Ed. Public Health Service, National Institutes of Health, Bethesda, Md. (“Kabat” numbering scheme), Al-Lazikani et al., (1997) JMB 273,927-948 (“Chothia” numbering scheme), or a combination thereof, and ImMunoGenTics (IMGT) numbering (Lefranc, M.-P., The Immunologist, 7, 132-136 (1999); Lefranc, M.-P. et al., Dev. Comp. Immunol., 27, 55-77 (2003) (“IMGT” numbering scheme). In a combined Kabat and Chothia numbering scheme for a given CDR region (for example, HC CDR1, HC CDR2, HC CDR3, LC CDR1, LC CDR2 or LC CDR3), in some embodiments, the CDRs correspond to the amino acid residues that are defined as part of the Kabat CDR, together with the amino acid residues that are defined as part of the Chothia CDR. As used herein, the CDRs defined according to the “Chothia” number scheme are also sometimes referred to as “hypervariable loops.”

[0625] For example, under Kabat, the CDR amino acid residues in the heavy chain variable domain (VH) are numbered 31-35 (HCDR1) (e.g., insertion(s) after position 35), 50-65 (HCDR2), and 95-102 (HCDR3); and the CDR amino acid residues in the light chain variable domain (VL) are numbered 24-34 (LCDR1) (e.g., insertion(s) after position 27), 50-56 (LCDR2), and 89-97 (LCDR3). As another example, under Chothia, the CDR amino acids in the VH are numbered 26-32 (HCDR1) (e.g., insertion(s) after position 31), 52-56 (HCDR2), and 95-102 (HCDR3); and the amino acid residues in VL are numbered 26-32 (LCDR1) (e.g., insertion(s) after position 30), 50-52 (LCDR2), and 91-96 (LCDR3). By combining the CDR definitions of both Kabat and Chothia, the CDRs comprise or consist of, e.g., amino acid residues 26-35 (HCDR1), 50-65 (HCDR2), and 95-102 (HCDR3) in human VH and amino acid residues 24-34 (LCDR1), 50-56 (LCDR2), and 89-97 (LCDR3) in human VL. Under IMGT, the CDR amino acid residues in the VH are numbered approximately 26-35 (CDR1), 51-57 (CDR2) and 93-102 (CDR3), and the CDR amino acid residues in the VL are numbered approximately 27-32 (CDR1), 50-52 (CDR2), and 89-97 (CDR3) (numbering according to “Kabat”). Under IMGT, the CDR regions of an antibody can be determined using the program IMGT/DomainGap Align. Generally, unless specifically indicated, the antibody molecules can include any combination of one or more Kabat CDRs and/or Chothia CDRs.

[0626] The term “epitope” includes any protein determinant capable of specific binding to an immunoglobulin or otherwise interacting with a molecule. Epitopic determinants generally consist of chemically active surface groupings of molecules such as amino acids or carbohydrate or sugar side chains and can have specific three-dimensional structural characteristics, as well as specific charge characteristics. An epitope may be “linear” or “conformational.” Conformational and linear epitopes are distinguished in that the binding to the former but not the latter is lost in the presence of denaturing solvents.

[0627] The term “monovalent antibody” as used herein, refers to an antibody that binds to a single epitope on a target molecule.

[0628] The term “bivalent antibody” as used herein, refers to an antibody that binds to two epitopes on at least two identical target molecules. The bivalent antibody may also crosslink the target molecules to one another. A “bivalent antibody” also refers to an antibody that binds to two different epitopes on at least two identical target molecules.

[0629] The term “multivalent antibody” refers to a single binding molecule with more than one valency, where “valency” is described as the number of antigen-binding moieties present per molecule of an antibody construct. As such, the single binding molecule can bind to more than one binding site on a target molecule. Examples of multivalent antibodies include, but are not limited to, bivalent antibodies, trivalent antibodies, tetravalent antibodies, pentavalent antibodies, and the like, as well as bispecific antibodies and biparatopic antibodies. For example, for ENTPD2, the multivalent antibody (e.g., a ENTPD2 biparatopic antibody) has a binding moiety for two domains of ENTPD2, respectively.

[0630] The term “multivalent antibody” also refers to a single binding molecule that has more than one antigen-binding moiety for two separate target molecules. For example, an antibody that binds to ENTPD2 (e.g., human ENTPD2 protein) and a second target molecule that is not ENTPD2. In one embodiment, a multivalent antibody is a tetravalent antibody that has four epitope binding domains. A tetravalent molecule may be bispecific and bivalent for each binding site on that target molecule.

[0631] The term “bispecific antibody” as used herein, refers to an antibody that binds to two or more different epitopes. In some embodiments, a bispecific antibody binds to two different targets. In some embodiments, a bispecific antibody binds to two different epitopes on a single target molecule. An antibody that binds to two different epitopes on a single target molecule is also known as a “biparatopic antibody.”

[0632] The phrases “monoclonal antibody” or “monoclonal antibody composition” as used herein refers to polypeptides, including antibodies, bispecific antibodies, etc., that have substantially identical amino acid sequence or are derived from the same genetic source. This term also includes preparations of antibody molecules of single molecular composition. A monoclonal antibody composition displays a single binding specificity and affinity for a particular epitope.

[0633] The phrase “human antibody,” as used herein, includes antibodies having variable regions in which both the framework and CDR regions are derived from sequences of human origin. Furthermore, if the antibody contains a constant region, the constant region is also derived from such human sequences, e.g., human germline sequences, or mutated versions of human germline sequences or antibody containing consensus framework sequences derived from human framework sequences analysis, for example, as described in Knappik, et al. (2000. J Mol Biol 296, 57-86). The structures and locations of immunoglobulin variable domains, e.g., CDRs, may be defined using well known numbering schemes, e.g., the Kabat numbering scheme, the Chothia numbering scheme, or a combination of Kabat and Chothia, and ImMunoGenTics (IMGT) numbering (see, e.g., Sequences of Proteins of Immunological Interest, U.S. Department of Health and Human Services (1991), eds. Kabat et al.; Al Lazikani et al., (1997) J. Mol. Bio. 273:927 948); Kabat et al., (1991) Sequences of Proteins of Immunological Interest, 5th edit., NIH Publication no. 91-3242 U.S. Department of Health and Human Services; Chothia et al., (1987) J. Mol. Biol. 196:901-917; Chothia et al., (1989) Nature 342:877-883; Al-Lazikani et al., (1997) J. Mal. Biol. 273:927-948 and Lefranc, M.-P., The Immunologist, 7, 132-136 (1999); Lefranc, M.-P. et al., Dev. Comp. Immunol., 27, 55-77 (2003)).

[0634] The human antibodies of the invention may include amino acid residues not encoded by human sequences (e.g., mutations introduced by random or site-specific mutagenesis in vitro or by somatic mutation in vivo, or a conservative substitution to promote stability or manufacturing). However, the term “human antibody” as used herein, is not intended to include antibodies in which CDR sequences derived from the germline of another mammalian species, such as a mouse, have been grafted onto human framework sequences.

[0635] The phrase “recombinant human antibody” as used herein, includes all human antibodies that are prepared, expressed, created or isolated by recombinant means, such as antibodies isolated from an animal (e.g., a mouse) that is transgenic or transchromosomal for human immunoglobulin genes or a hybridoma prepared therefrom, antibodies isolated from a host cell transformed to express the human antibody, e.g., from a transfectoma, antibodies isolated from a recombinant, combinatorial human antibody library, and antibodies prepared, expressed, created or isolated by any other means that involve splicing of all or a portion of a human immunoglobulin gene, sequences to other DNA sequences. Such recombinant human antibodies have variable regions in which the framework and CDR regions are derived from human germline immunoglobulin sequences. In certain embodiments, however, such recombinant human antibodies can be subjected to in vitro mutagenesis (or, when an animal transgenic for human Ig sequences is used, in vivo somatic mutagenesis) and thus the amino acid sequences of the VH and VL regions of the recombinant antibodies are sequences that, while derived from and related to human germline VH and VL sequences, may not naturally exist within the human antibody germline repertoire in vivo.

[0636] The term “Fc region” as used herein refers to a polypeptide comprising the CH3, CH2 and at least a portion of the hinge region of a constant domain of an antibody. Optionally, an Fc region may include a CH4 domain, present in some antibody classes. An Fc region, may comprise the entire hinge region of a constant domain of an antibody. In one embodiment, the invention comprises an Fc region and a CH1 region of an antibody. In one embodiment, the invention comprises an Fc region CH3 region of an antibody. In another embodiment, the invention comprises an Fc region, a CH1 region and a Ckappa/lambda region from the constant domain of an antibody. In one embodiment, a binding molecule of the invention comprises a constant region, e.g., a heavy chain constant region. In one embodiment, such a constant region is modified compared to a wild-type constant region. That is, the polypeptides of the invention disclosed herein may comprise alterations or modifications to one or more of the three heavy chain constant domains (CH1, CH2 or CH3) and/or to the light chain constant region domain (CL). Example modifications include additions, deletions or substitutions of one or more amino acids in one or more domains. Such changes may be included to optimize effector function, half-life, etc.

[0637] As used herein, the term “affinity” refers to the strength of interaction between antibody and antigen at single antigenic sites. Within each antigenic site, the variable region of the antibody “arm” interacts through weak non-covalent forces with the antigen at numerous sites; the more interactions, the stronger the affinity. As used herein, the term “high affinity” for an IgG antibody or fragment thereof (e.g., a Fab fragment) refers to an antibody having a knock down of 10⁻⁸ M or less, 10⁻⁹ M or less, or 10⁻¹⁰ M, or 10⁻¹¹ M or less, or 10⁻¹² M or less, or 10⁻¹³ M or less for a target antigen. However, high affinity binding can vary for other antibody isotypes. For example, high affinity binding for an IgM isotype refers to an antibody having a knock down of 10⁻⁷ M or less, or 10⁻⁸ M or less.

[0638] As used herein, the term “avidity” refers to an informative measure of the overall stability or strength of the antibody-antigen complex. It is controlled by three major factors: antibody epitope affinity; the valency of both the antigen and antibody; and the structural arrangement of the interacting parts. Ultimately these factors define the specificity of the antibody, that is, the likelihood that the particular antibody is binding to a precise antigen epitope.

[0639] The term “binding specificity” as used herein refers to the ability of an individual antibody combining site to react with one antigenic determinant and not with a different antigenic determinant. The combining site of the antibody is located in the Fab portion of the molecule and is constructed from the hypervariable regions of the heavy and light chains. Binding affinity of an antibody is the strength of the reaction between a single antigenic determinant and a single combining site on the antibody. It is the sum of the attractive and repulsive forces operating between the antigenic determinant and the combining site of the antibody.

[0640] The term “treat” and “treatment” refer to both therapeutic treatment and prophylactic or preventive measures, wherein the object is to prevent or slow down an undesired physiological change or disorder. For purpose of this invention, beneficial or desired clinical results include, but are not limited to, alleviation of symptoms, diminishment of extent of disease, stabilized (i.e., not worsening) state of disease, delay or slowing of disease progression, amelioration or palliation of the disease state, and remission (whether partial or total), whether detectable or undetectable. “Treatment” can also mean prolonging survival as compared to expected survival if not receiving treatment. In other embodiments the terms “treat”, “treatment” and “treating” refer to the inhibition of the progression of a proliferative disorder, either physically by, e.g., stabilization of a discernible symptom, physiologically by, e.g., stabilization of a physical parameter, or both. In other embodiments the terms “treat”, “treatment” and “treating” refer to the reduction or stabilization of tumor size or cancerous cell count.

[0641] The term “subject” refers to an animal, human or non-human, to whom treatment according to the methods of the present invention is provided. Veterinary and non-veterinary applications are contemplated. The term includes, but is not limited to, mammals, e.g., humans, other primates, pigs, rodents such as mice and rats, rabbits, guinea pigs, hamsters, cows, horses, cats, dogs, sheep and goats. Typical subjects include humans, farm animals, and domestic pets such as cats and dogs. In some embodiments, the subject is a human.

[0642] An “effective amount” refers to an amount sufficient to effect beneficial or desired results. For example, a therapeutic amount is one that achieves the desired therapeutic effect. This amount can be the same or different from a prophylactically effective amount, which is an amount necessary to prevent onset of disease or disease symptoms. An effective amount can be administered in one or more administrations, applications or dosages. A “therapeutically effective amount” of a therapeutic compound (i.e., an effective dosage) depends on the therapeutic compounds selected. The compositions can be administered from one or more times per day to one or more times per week. The skilled artisan will appreciate that certain factors may influence the dosage and timing required to effectively treat a subject, including but not limited to the severity of the disease or disorder, previous treatments, the general health and/or age of the subject, and other diseases present. Moreover, treatment of a subject with a therapeutically effective amount of the therapeutic compounds described herein can include a single treatment or a series of treatments.

[0643] The term “nucleic acid” or “polynucleotide” refers to deoxyribonucleic acids (DNA) or ribonucleic acids (RNA) and polymers thereof in either single- or double-stranded form. The term “set of nucleic acids” may, for example, include separate isolated nucleic acids encoding a light chain and a heavy chain of an antibody or domains of a bi-specific or multispecific antibody. Unless specifically limited, the term encompasses nucleic acids containing known analogues of natural nucleotides that have similar binding properties as the reference nucleic acid and are metabolized in a manner similar to naturally occurring nucleotides. Unless otherwise indicated, a particular nucleic acid sequence also implicitly encompasses conservatively modified variants thereof (e.g., degenerate codon substitutions), alleles, orthologs, SNPs, and complementary sequences as well as the sequence explicitly indicated. Specifically, degenerate codon substitutions may be achieved by generating sequences in which the third position of one or more selected (or all) codons is substituted with mixed-base and/or deoxyinosine residues (Batzer et al., Nucleic Acid Res. 19:5081 (1991); Ohtsuka et al., J. Biol. Chem. 260:2605-2608 (1985); and Rossolini et al., Mol. Cell. Probes 8:91-98 (1994)).

[0644] The terms “peptide”, “polypeptide”, and “protein” are used interchangeably, and refer to a compound comprised of amino acid residues covalently linked by peptide bonds. A protein or peptide must contain at least two amino acids, and no limitation is placed on the maximum number of amino acids that can comprise a protein's or peptide's sequence. Polypeptides include any peptide or protein comprising two or more amino acids joined to each other by peptide bonds. As used herein, the term refers to both short chains, which also commonly are referred to in the art as peptides, oligopeptides and oligomers, for example, and to longer chains, which generally are referred to in the art as proteins, of which there are many types. “Polypeptides” include, for example, biologically active fragments, substantially homologous polypeptides, oligopeptides, homodimers, heterodimers, variants of polypeptides, modified polypeptides, derivatives, analogs, fusion proteins, among others. A polypeptide includes a natural peptide, a recombinant peptide, or a combination thereof.

[0645] The term “conservative sequence modifications” refers to amino acid modifications that do not significantly affect or alter the binding characteristics of the antibody or antibody fragment containing the amino acid sequence. Such conservative modifications include amino acid substitutions, additions and deletions. Modifications can be introduced into an antibody or antibody fragment of the invention by standard techniques known in the art, such as site-directed mutagenesis and PCR-mediated mutagenesis. Conservative amino acid substitutions are ones in which the amino acid residue is replaced with an amino acid residue having a similar side chain. Families of amino acid residues having similar side chains have been defined in the art. These families include amino acids with basic side chains (e.g., lysine, arginine, histidine), acidic side chains (e.g., aspartic acid, glutamic acid), uncharged polar side chains (e.g., glycine, asparagine, glutamine, serine, threonine, tyrosine, cysteine, tryptophan), nonpolar side chains (e.g., alanine, valine, leucine, isoleucine, proline, phenylalanine, methionine), beta-branched side chains (e.g., threonine, valine, isoleucine) and aromatic side chains (e.g., tyrosine, phenylalanine, tryptophan, histidine).

[0646] The term “homologous” or “identity” refers to the subunit sequence identity between two polymeric molecules, e.g., between two nucleic acid molecules, such as, two DNA molecules or two RNA molecules, or between two polypeptide molecules. When a subunit position in both of the two molecules is occupied by the same monomeric subunit; e.g., if a position in each of two DNA molecules is occupied by adenine, then they are homologous or identical at that position. The homology between two sequences is a direct function of the number of matching or homologous positions; e.g., if half (e.g., five positions in a polymer ten subunits in length) of the positions in two sequences are homologous, the two sequences are 50% homologous; if 90% of the positions (e.g., 9 of 10), are matched or homologous, the two sequences are 90% homologous. Percentage of “sequence identity” can be determined by comparing two optimally aligned sequences over a comparison window, where the fragment of the amino acid sequence in the comparison window may comprise additions or deletions (e.g., gaps or overhangs) as compared to the reference sequence (which does not comprise additions or deletions) for optimal alignment of the two sequences. The percentage can be calculated by determining the number of positions at which the identical amino acid residue occurs in both sequences to yield the number of matched positions, dividing the number of matched positions by the total number of positions in the window of comparison, and multiplying the result by 100 to yield the percentage of sequence identity. The output is the percent identity of the subject sequence with respect to the query sequence.

[0647] The term “isolated” means altered or removed from the natural state. For example, a nucleic acid or a peptide naturally present in a living animal is not “isolated,” but the same nucleic acid or peptide partially or completely separated from the coexisting materials of its natural state is “isolated.” An isolated nucleic acid or protein can exist in substantially purified form, or can exist in a non-native environment such as, for example, a host cell. An isolated antibody is substantially free of other antibodies having different antigenic specificities (e.g., an isolated antibody that specifically binds ENTPD2 is substantially free of antibodies that specifically bind antigens other than ENTPD2). An isolated antibody that specifically binds a target molecule may, however, have cross-reactivity to the same antigens from other species, e.g., an isolated antibody that specifically binds ENTPD2 may bind ENTPD2 molecules from other species. Moreover, an isolated antibody may be substantially free of other cellular material and/or chemicals.

[0648] Unless otherwise defined, all technical and scientific terms used herein have the same meaning as commonly understood by one of ordinary skill in the art to which this invention pertains. Although methods and materials similar or equivalent to those described herein can be used to practice the invention, suitable methods and materials are described below. All publications, patent applications, patents, and other references mentioned herein are incorporated by reference in their entirety. In case of conflict, the present specification, including definitions, will control. In addition, the materials, methods, and examples are illustrative only and not intended to be limiting.

[0649] The details of one or more embodiments of the invention are set forth in the accompanying drawings and the description below. Other features, objects, and advantages of the invention will be apparent from the description and drawings, and from the claims.

### Antibodies and Antigen-Binding Fragments Thereof That Specifically Bind to Human ENTPD2

[0650] In one aspect, the invention relates to a combination comprising an antibody or antigen-binding fragment thereof that specifically binds to the ectoenzyme ectonucleoside triphosphate diphosphohydrolase 2 (ENTPD2) and an antibody or antigen-binding fragment thereof that specifically binds to CD73 (Cluster of Differentiation 73).

[0651] In one embodiment of the combination of the invention, the anti-ENTPD2 antibody therein is an antibody or antigen binding fragment thereof, e.g., monoclonal antibody or antigen binding fragment thereof, that specifically binds to the ENTPD2 protein (“ENTPD2 antibody or antigen binding fragment” or “anti-ENTPD2 antibody or antigen binding fragment”). In some embodiments of the combination of the invention, the antibody or antigen binding fragment thereof, e.g., monoclonal antibody or antigen binding fragment thereof, specifically binds to the human ENTPD2 protein (“human ENTPD2 antibody or antigen binding fragment” or “anti-human ENTPD2 antibody or antigen binding fragment”).

[0652] In some embodiments of the combination of the invention, the anti-ENTPD2 antibody or antigen-binding fragment thereof (e.g., anti-human ENTPD2 antibody or antigen binding fragment) provided herein includes a heavy chain CDR1 (HCDR1), a heavy chain CDR2 (HCDR2), a heavy chain CDR3 (HCDR3), and a light chain CDR1 (LCDR1), a light chain CDR2 (LCDR2), and a light chain CDR3 (LCDR3). In some embodiments, the anti-ENTPD2 antibody or antigen binding fragment (e.g., anti-human ENTPD2 antibody or antigen binding fragment) provided herein includes a heavy chain variable region (VH) comprising CDR1, CDR2, and CDR3 and a light chain variable region (VL) comprising CDR1, CDR2, and CDR3. In some embodiments, the anti-ENTPD2 antibody or antigen-binding fragment (e.g., anti-human ENTPD2 antibody or antigen binding fragment) provided herein include a full length heavy chain sequence (HC) and a full length light chain sequence (LC).

[0653] Table 1 lists the sequences of exemplary ENTPD2 antibodies or antigen-binding fragments that specifically bind to human ENTPD2 protein.

TABLE 1
Sequences of Exemplary Monoclonal Antibodies (MABs) and Antibody
Fragments (FABs) That Bind Human ENTPD2

| ANTI-HUMAN | | |
|---|---|---|
| ENTPD2 MAB1 | | |
| SEQ ID NO: 1 | HCDR1 (KABAT) | DYNMD |
| SEQ ID NO: 2 | HCDR2 (KABAT) | DINPKYDISTYNQQFKG |
| SEQ ID NO: 3 | HCDR3 (KABAT) | RGFFLYYGINYYYFDV |
| SEQ ID NO: 4 | HCDR1 (CHOTHIA) | GYTFTDY |
| SEQ ID NO: 5 | HCDR2 (CHOTHIA) | NPKYDI |
| SEQ ID NO: 3 | HCDR3 (CHOTHIA) | RGFFLYYGINYYYFDV |
| SEQ ID NO: 6 | HCDR1 (COMBINED) | GYTFTDYNMD |
| SEQ ID NO: 2 | HCDR2 (COMBINED) | DINPKYDISTYNQQFKG |
| SEQ ID NO: 3 | HCDR3 (COMBINED) | RGFFLYYGINYYYFDV |
| SEQ ID NO: 7 | HCDR1 (IMGT) | GYTFTDYN |
| SEQ ID NO: 8 | HCDR2 (IMGT) | INPKYDIS |
| SEQ ID NO: 9 | HCDR3 (IMGT) | ARRGFFLYYGINYYYFDV |
| SEQ ID NO: 10 | VH | EVQLVQSGAEVKKPGESLKISCKASGYTFTDYNMDWVRQM |
| | | PGKGLEWMGDINPKYDISTYNQQFKGQVTISADKSIRTAY |
| | | LQWSSLKASDTAMYYCARRGFFLYYGINYYYFDVWGQGTL |
| | | VTVSS |
| SEQ ID NO: 11 | VH DNA | GAAGTGCAGCTGGTGCAGTCTGGCGCCGAAGTGAAGAAGC |
| | | CTGGCGAGTCCCTGAAGATCTCCTGCAAGGCCTCCGGCTA |
| | | CACCTTCACCGACTACAACATGGACTGGGTGCGACAGATG |
| | | CCCGGCAAGGGCCTGGAATGGATGGGCGACATCAACCCTA |
| | | AGTACGACATCTCCACCTACAACCAGCAGTTCAAGGGCCA |
| | | AGTGACCATCTCCGCCGACAAGTCCATCCGGACCGCCTAC |
| | | CTGCAGTGGTCCTCCCTGAAGGCCTCTGACACCGCCATGT |
| | | ACTACTGCGCCAGACGGGGCTTCTTCCTGTACTACGGCAT |
| | | CAACTACTACTACTTCGACGTGTGGGGCCAGGGCACCCTC |
| | | GTGACAGTGTCATCT |
| SEQ ID NO: 12 | HC | EVQLVQSGAEVKKPGESLKISCKASGYTFTDYNMDWVRQM |
| | | PGKGLEWMGDINPKYDISTYNQQFKGQVTISADKSIRTAY |
| | | LQWSSLKASDTAMYYCARRGFFLYYGINYYYFDVWGQGTL |
| | | VTVSSASTKGPSVFPLAPSSKSTSGGTAALGCLVKDYFPE |
| | | PVTVSWNSGALTSGVHTFPAVLQSSGLYSLSSVVTVPSSS |
| | | LGTQTYICNVNHKPSNTKVDKRVEPKSCDKTHTCPPCPAP |
| | | ELLGGPSVFLFPPKPKDTLMISRTPEVTCVVVDVSHEDPE |
| | | VKFNWYVDGVEVHNAKTKPREEQYNSTYRVVSVLTVLHQD |
| | | WLNGKEYKCKVSNKALPAPIEKTISKAKGQPREPQVYTLP |
| | | PSREEMTKNQVSLTCLVKGFYPSDIAVEWESNGQPENNYK |
| | | TTPPVLDSDGSFFLYSKLTVDKSRWQQGNVFSCSVMHEAL |
| | | HNHYTQKSLSLSPGK |
| SEQ ID NO: 13 | HC DNA | GAAGTGCAGCTGGTGCAGTCTGGCGCCGAAGTGAAGAAGC |
| | | CTGGCGAGTCCCTGAAGATCTCCTGCAAGGCCTCCGGCTA |
| | | CACCTTCACCGACTACAACATGGACTGGGTGCGACAGATG |
| | | CCCGGCAAGGGCCTGGAATGGATGGGCGACATCAACCCTA |
| | | AGTACGACATCTCCACCTACAACCAGCAGTTCAAGGGCCA |
| | | AGTGACCATCTCCGCCGACAAGTCCATCCGGACCGCCTAC |
| | | CTGCAGTGGTCCTCCCTGAAGGCCTCTGACACCGCCATGT |
| | | ACTACTGCGCCAGACGGGGCTTCTTCCTGTACTACGGCAT |
| | | CAACTACTACTACTTCGACGTGTGGGGCCAGGGCACCCTC |
| | | GTGACAGTGTCATCTGCTAGCACCAAGGGCCCAAGTGTGT |
| | | TTCCCCTGGCCCCCAGCAGCAAGTCTACTTCCGGCGGAAC |
| | | TGCTGCCCTGGGTTGCCTGGTGAAGGACTACTTCCCCGAG |
| | | CCCGTGACAGTGTCCTGGAACTCTGGGGCTCTGACTTCCG |
| | | GCGTGCACACCTTCCCCGCCGTGCTGCAGAGCAGCGGCCT |
| | | GTACAGCCTGAGCAGCGTGGTGACAGTGCCCTCCAGCTCT |
| | | CTGGGAACCCAGACCTATATCTGCAACGTGAACCACAAGC |
| | | CCAGCAACACCAAGGTGGACAAGAGAGTGGAGCCCAAGAG |
| | | CTGCGACAAGACCCACACCTGCCCCCCCTGCCCAGCTCCA |
| | | GAACTGCTGGGAGGGCCTTCCGTGTTCCTGTTCCCCCCCA |
| | | AGCCCAAGGACACCCTGATGATCAGCAGGACCCCCGAGGT |
| | | GACCTGCGTGGTGGTGGACGTGTCCCACGAGGACCCAGAG |
| | | GTGAAGTTCAACTGGTACGTGGACGGCGTGGAGGTGCACA |
| | | ACGCCAAGACCAAGCCCAGAGAGGAGCAGTACAACAGCAC |
| | | CTACAGGGTGGTGTCCGTGCTGACCGTGCTGCACCAGGAC |
| | | TGGCTGAACGGCAAAGAATACAAGTGCAAAGTCTCCAACA |
| | | AGGCCCTGCCAGCCCCAATCGAAAAGACAATCAGCAAGGC |
| | | CAAGGGCCAGCCACGGGAGCCCCAGGTGTACACCCTGCCC |
| | | CCCAGCCGGGAGGAGATGACCAAGAACCAGGTGTCCCTGA |
| | | CCTGTCTGGTGAAGGGCTTCTACCCCAGCGATATCGCCGT |
| | | GGAGTGGGAGAGCAACGGCCAGCCCGAGAACAACTACAAG |
| | | ACCACCCCCCCAGTGCTGGACAGCGACGGCAGCTTCTTCC |
| | | TGTACAGCAAGCTGACCGTGGACAAGTCCAGGTGGCAGCA |
| | | GGGCAACGTGTTCAGCTGCAGCGTGATGCACGAGGCCCTG |
| | | CACAACCACTACACCCAGAAGTCCCTGAGCCTGAGCCCCG |
| | | GCAAG |
| SEQ ID NO: 14 | LCDR1 (KABAT) | SASSSVSYIH |
| SEQ ID NO: 15 | LCDR2 (KABAT) | STSNLAS |
| SEQ ID NO: 16 | LCDR3 (KABAT) | wwSSYPWT |
| SEQ ID NO: 17 | LCDR1 (CHOTHIA) | SSSVSY |
| SEQ ID NO: 18 | LCDR2 (CHOTHIA) | STS |
| SEQ ID NO: 19 | LCDR3 (CHOTHIA) | wSSYPW |
| SEQ ID NO: 14 | LCDR1 (COMBINED) | SASSSVSYIH |
| SEQ ID NO: 15 | LCDR2 (COMBINED) | STSNLAS |
| SEQ ID NO: 16 | LCDR3 (COMBINED) | HQWSSYPWT |
| SEQ ID NO: 20 | LCDR1 (IMGT) | SSVSY |
| SEQ ID NO: 18 | LCDR2 (IMGT) | STS |
| SEQ ID NO: 16 | LCDR3 (IMGT) | HQWSSYPWT |
| SEQ ID NO: 21 | VL | DIQLTQSPSSLSASVGDRVTITCSASSSVSYIHWFQQKPG |
| | | KAPKLLIYSTSNLASGVPSRFSGSGSGTFFTLTISSLQPE |
| | | DFATYFCHQWSSYPWTFGQGTKVEIK |
| SEQ ID NO: 22 | VL DNA | GATATCCAGCTGACCCAGTCCCCTTCCAGCCTGTCTGCCT |
| | | CTGTGGGCGACAGAGTGACAATTACCTGCTCCGCCTCCTC |
| | | CTCCGTGTCCTACATCCACTGGTTCCAGCAGAAGCCCGGC |
| | | AAGGCCCCCAAGCTGCTGATCTACTCCACCTCCAACCTGG |
| | | CCTCCGGCGTGCCCTCTAGATTCTCCGGCTCTGGCTCTGG |
| | | CACCTTTTTTACCCTGACCATCTCCAGCCTGCAGCCCGAG |
| | | GACTTCGCCACCTACTTTTGCCACCAGTGGTCCAGCTACC |
| | | CCTGGACCTTTGGCCAGGGCACCAAGGTGGAAATCAAG |
| SEQ ID NO: 23 | LC | QPEDFATYFCHQWSSYPWTFGQGTKVEIKRTVAAPSVFIF |
| | | PPSDEQLKSGTASVVCLLNNFYPREAKVQWKVDNALQSGN |
| | | SQESVTEQDSKDSTYSLSSTLTLSKADYEKHKVYACEVTH |
| | | QGLSSPVTKSFNRGEC |
| SEQ ID NO: 24 | LC DNA | GATATCCAGCTGACCCAGTCCCCTTCCAGCCTGTCTGCCT |
| | | CTGTGGGCGACAGAGTGACAATTACCTGCTCCGCCTCCTC |
| | | CTCCGTGTCCTACATCCACTGGTTCCAGCAGAAGCCCGGC |
| | | AAGGCCCCCAAGCTGCTGATCTACTCCACCTCCAACCTGG |
| | | CCTCCGGCGTGCCCTCTAGATTCTCCGGCTCTGGCTCTGG |
| | | CACCTTTTTTACCCTGACCATCTCCAGCCTGCAGCCCGAG |
| | | GACTTCGCCACCTACTTTTGCCACCAGTGGTCCAGCTACC |
| | | CCTGGACCTTTGGCCAGGGCACCAAGGTGGAAATCAAGCG |
| | | TACGGTGGCCGCTCCCAGCGTGTTCATCTTCCCCCCCAGC |
| | | GACGAGCAGCTGAAGAGTGGCACCGCCAGCGTGGTGTGCC |
| | | TGCTGAACAACTTCTACCCCCGGGAGGCCAAGGTGCAGTG |
| | | GAAGGTGGACAACGCCCTGCAGAGCGGCAACAGCCAGGAG |
| | | AGCGTCACCGAGCAGGACAGCAAGGACTCCACCTACAGCC |
| | | TGAGCAGCACCCTGACCCTGAGCAAGGCCGACTACGAGAA |
| | | GCATAAGGTGTACGCCTGCGAGGTGACCCACCAGGGCCTG |
| | | TCCAGCCCCGTGACCAAGAGCTTCAACAGGGGCGAGTGC |
| ANTI-HUMAN | | |
| ENTPD2 MAB2 | | |
| SEQ ID NO: 1 | HCDR1 (KABAT) | DYNMD |
| SEQ ID NO: 2 | HCDR2 (KABAT) | DINPKYDISTYNQQFKG |
| SEQ ID NO: 3 | HCDR3 (KABAT) | RGEFLYYGINYYYFDV |
| SEQ ID NO: 4 | HCDR1 (CHOTHIA) | GYTFTDY |
| SEQ ID NO: 5 | HCDR2 (CHOTHIA) | NPKYDI |
| SEQ ID NO: 3 | HCDR3 (CHOTHIA) | RGEFLYYGINYYYFDV |
| SEQ ID NO: 6 | HCDR1 (COMBINED) | GYTFTDYNMD |
| SEQ ID NO: 2 | HCDR2 (COMBINED) | DINPKYDISTYNQQFKG |
| SEQ ID NO: 3 | HCDR3 (COMBINED) | RGEFLYYGINYYYFDV |
| SEQ ID NO: 7 | HCDR1 (IMGT) | GYTFTDYN |
| SEQ ID NO: 8 | HCDR2 (IMGT) | INPKYDIS |
| SEQ ID NO: 9 | HCDR3 (IMGT) | ARRGEFLYYGINYYYFDV |
| SEQ ID NO: 25 | VH | QVQLVQSGAEVVKPGASVKISCKASGYTFTDYNMDWVKQA |
| | | PGQRLEWIGDINPKYDISTYNQQFKGKATITVDKSASTAY |
| | | MELSSLRSEDTAVYYCARRGEFLYYGINYYYFDVVVGQGT |
| | | LVTVSS |
| SEQ ID NO: 26 | VH DNA | CAGGTGCAGCTGGTGCAGTCTGGCGCCGAGGTGGTGAAAC |
| | | CTGGCGCCTCCGTGAAGATCTCCTGCAAGGCCTCCGGCTA |
| | | CACCTTCACCGACTACAACATGGACTGGGTGAAACAGGCC |
| | | CCTGGCCAGCGGCTGGAATGGATCGGCGACATCAACCCTA |
| | | AGTACGACATCTCCACCTACAACCAGCAGTTCAAGGGCAA |
| | | GGCCACCATCACCGTGGACAAGTCCGCCTCCACCGCCTAC |
| | | ATGGAACTGTCCTCCCTGCGGAGCGAGGACACCGCCGTGT |
| | | ACTACTGCGCCAGACGGGGCTTCTTCCTGTACTACGGCAT |
| | | CAACTACTACTACTTCGACGTGTGGGGCCAGGGCACCCTG |
| | | GTGACAGTGTCCTCC |
| SEQ ID NO: 27 | HC | QVQLVQSGAEVVKPGASVKISCKASGYTFTDYNMDWVKQA |
| | | PGQRLEWIGDINPKYDISTYNQQFKGKATITVDKSASTAY |
| | | MELSSLRSEDTAVYYCARRGEFLYYGINYYYFDVWGQGTL |
| | | VTVSSASTKGPSVFPLAPSSKSTSGGTAALGCLVKDYFPE |
| | | PVTVSWNSGALTSGVHTFPAVLQSSGLYSLSSVVTVPSSS |
| | | LGTQTYICNVNHKPSNTKVDKRVEPKSCDKTHTCPPCPAP |
| | | ELLGGPSVFLFPPKPKDTLMISRTPEVTCVVVDVSHEDPE |
| | | VKFNVVYVDGVEVHNAKTKPREEQYNSTYRVVSVLTVLHQ |
| | | DWLNGKEYKCKVSNKALPAPIEKTISKAKGQPREPQVYTL |
| | | PPSREEMTKNQVSLTCLVKGFYPSDIAVEWESNGQPENNY |
| | | KTTPPVLDSDGSFFLYSKLTVDKSRWQQGNVFSCSVMHEA |
| | | LHNHYTQKSLSLSPGK |
| SEQ ID NO: 28 | HC DNA | CAGGTGCAGCTGGTGCAGTCTGGCGCCGAGGTGGTGAAAC |
| | | CTGGCGCCTCCGTGAAGATCTCCTGCAAGGCCTCCGGCTA |
| | | CACCTTCACCGACTACAACATGGACTGGGTGAAACAGGCC |
| | | CCTGGCCAGCGGCTGGAATGGATCGGCGACATCAACCCTA |
| | | AGTACGACATCTCCACCTACAACCAGCAGTTCAAGGGCAA |
| | | GGCCACCATCACCGTGGACAAGTCCGCCTCCACCGCCTAC |
| | | ATGGAACTGTCCTCCCTGCGGAGCGAGGACACCGCCGTGT |
| | | ACTACTGCGCCAGACGGGGCTTCTTCCTGTACTACGGCAT |
| | | CAACTACTACTACTTCGACGTGTGGGGCCAGGGCACCCTG |
| | | GTGACAGTGTCCTCCGCTAGCACCAAGGGCCCAAGTGTGT |
| | | TTCCCCTGGCCCCCAGCAGCAAGTCTACTTCCGGCGGAAC |
| | | TGCTGCCCTGGGTTGCCTGGTGAAGGACTACTTCCCCGAG |
| | | CCCGTGACAGTGTCCTGGAACTCTGGGGCTCTGACTTCCG |
| | | GCGTGCACACCTTCCCCGCCGTGCTGCAGAGCAGCGGCCT |
| | | GTACAGCCTGAGCAGCGTGGTGACAGTGCCCTCCAGCTCT |
| | | CTGGGAACCCAGACCTATATCTGCAACGTGAACCACAAGC |
| | | CCAGCAACACCAAGGTGGACAAGAGAGTGGAGCCCAAGAG |
| | | CTGCGACAAGACCCACACCTGCCCCCCCTGCCCAGCTCCA |
| | | GAACTGCTGGGAGGGCCTTCCGTGTTCCTGTTCCCCCCCA |
| | | AGCCCAAGGACACCCTGATGATCAGCAGGACCCCCGAGGT |
| | | GACCTGCGTGGTGGTGGACGTGTCCCACGAGGACCCAGAG |
| | | GTGAAGTTCAACTGGTACGTGGACGGCGTGGAGGTGCACA |
| | | ACGCCAAGACCAAGCCCAGAGAGGAGCAGTACAACAGCAC |
| | | CTACAGGGTGGTGTCCGTGCTGACCGTGCTGCACCAGGAC |
| | | TGGCTGAACGGCAAAGAATACAAGTGCAAAGTCTCCAACA |
| | | AGGCCCTGCCAGCCCCAATCGAAAAGACAATCAGCAAGGC |
| | | CAAGGGCCAGCCACGGGAGCCCCAGGTGTACACCCTGCCC |
| | | CCCAGCCGGGAGGAGATGACCAAGAACCAGGTGTCCCTGA |
| | | CCTGTCTGGTGAAGGGCTTCTACCCCAGCGATATCGCCGT |
| | | GGAGTGGGAGAGCAACGGCCAGCCCGAGAACAACTACAAG |
| | | ACCACCCCCCCAGTGCTGGACAGCGACGGCAGCTTCTTCC |
| | | TGTACAGCAAGCTGACCGTGGACAAGTCCAGGTGGCAGCA |
| | | GGGCAACGTGTTCAGCTGCAGCGTGATGCACGAGGCCCTG |
| | | CACAACCACTACACCCAGAAGTCCCTGAGCCTGAGCCCCG |
| | | GCAAG |
| SEQ ID NO: 14 | LCDR1 (KABAT) | SASSSVSYIH |
| SEQ ID NO: 15 | LCDR2 (KABAT) | STSNLAS |
| SEQ ID NO: 16 | LCDR3 (KABAT) | HQWSSYPWT |
| SEQ ID NO: 17 | LCDR1 (CHOTHIA) | SSSVSY |
| SEQ ID NO: 18 | LCDR2 (CHOTHIA) | STS |
| SEQ ID NO: 19 | LCDR3 (CHOTHIA) | WSSYPW |
| SEQ ID NO: 14 | LCDR1 (COMBINED) | SASSSVSYIH |
| SEQ ID NO: 15 | LCDR2 (COMBINED) | STSNLAS |
| SEQ ID NO: 16 | LCDR3 (COMBINED) | HQWSSYPWT |
| SEQ ID NO: 20 | LCDR1 (IMGT) | SSVSY |
| SEQ ID NO: 18 | LCDR2 (IMGT) | STS |
| SEQ ID NO: 16 | LCDR3 (IMGT) | HQWSSYPWT |
| SEQ ID NO: 29 | VL | EIVLTQSPATLSASPGERITLSCSASSSVSYIHWYQQKPG |
| | | QAPRLLIYSTSNLASGIPARFSGSGSGTFYTLTISSVEPE |
| | | DAAVYYCHQWSSYPWTFGGGTKLEIK |
| SEQ ID NO: 30 | VL DNA | GAGATCGTGCTGACCCAGTCCCCTGCCACCCTGTCTGCCA |
| | | GCCCTGGCGAGCGGATCACCCTGTCCTGCTCCGCCTCCTC |
| | | CTCCGTGTCCTACATCCACTGGTATCAGCAGAAGCCCGGC |
| | | CAGGCCCCTCGGCTGCTGATCTACTCCACCTCCAACCTGG |
| | | CCTCCGGCATCCCTGCCAGATTCTCCGGCTCTGGCTCCGG |
| | | CACCTTTTACACCCTGACCATCTCCAGCGTGGAACCCGAG |
| | | GACGCCGCCGTGTACTACTGCCACCAGTGGTCCAGCTACC |
| | | CCTGGACCTTCGGCGGAGGCACCAAGCTGGAAATCAAG |
| SEQ ID NO: 31 | LC | EIVLTQSPATLSASPGERITLSCSASSSVSYIHWYQQKPG |
| | | QAPRLLIYSTSNLASGIPARFSGSGSGTFYTLTISSVEPE |
| | | DAAVYYCHQWSSYPWTEGGGTKLEIKRTVAAPSVEIEPPS |
| | | DEQLKSGTASVVCLLNNFYPREAKVQWKVDNALQSGNSQE |
| | | SVTEQDSKDSTYSLSSTLTLSKADYEKHKVYACEVTHQGL |
| | | SSPVTKSENRGEC |
| SEQ ID NO: 32 | LC DNA | GAGATCGTGCTGACCCAGTCCCCTGCCACCCTGTCTGCCA |
| | | GCCCTGGCGAGCGGATCACCCTGTCCTGCTCCGCCTCCTC |
| | | CTCCGTGTCCTACATCCACTGGTATCAGCAGAAGCCCGGC |
| | | CAGGCCCCTCGGCTGCTGATCTACTCCACCTCCAACCTGG |
| | | CCTCCGGCATCCCTGCCAGATTCTCCGGCTCTGGCTCCGG |
| | | CACCTTTTACACCCTGACCATCTCCAGCGTGGAACCCGAG |
| | | GACGCCGCCGTGTACTACTGCCACCAGTGGTCCAGCTACC |
| | | CCTGGACCTTCGGCGGAGGCACCAAGCTGGAAATCAAGCG |
| | | TACGGTGGCCGCTCCCAGCGTGTTCATCTTCCCCCCCAGC |
| | | GACGAGCAGCTGAAGAGTGGCACCGCCAGCGTGGTGTGCC |
| | | TGCTGAACAACTTCTACCCCCGGGAGGCCAAGGTGCAGTG |
| | | GAAGGTGGACAACGCCCTGCAGAGCGGCAACAGCCAGGAG |
| | | AGCGTCACCGAGCAGGACAGCAAGGACTCCACCTACAGCC |
| | | TGAGCAGCACCCTGACCCTGAGCAAGGCCGACTACGAGAA |
| | | GCATAAGGTGTACGCCTGCGAGGTGACCCACCAGGGCCTG |
| | | TCCAGCCCCGTGACCAAGAGCTTCAACAGGGGCGAGTGC |
| ANTI-HUMAN | | |
| ENTPD2 MAB3 | | |
| SEQ ID NO: 1 | HCDR1 (KABAT) | DYNMD |
| SEQ ID NO: 2 | HCDR2 (KABAT) | DINPKYDISTYNQQFKG |
| SEQ ID NO: 3 | HCDR3 (KABAT) | RGEFLYYGINYYYEDV |
| SEQ ID NO: 4 | HCDR1 (CHOTHIA) | GYTFTDY |
| SEQ ID NO: 5 | HCDR2 (CHOTHIA) | NPKYDI |
| SEQ ID NO: 3 | HCDR3 (CHOTHIA) | RGEFLYYGINYYYEDV |
| SEQ ID NO: 6 | HCDR1 (COMBINED) | GYTFTDYNMD |
| SEQ ID NO: 2 | HCDR2 (COMBINED) | DINPKYDISTYNQQFKG |
| SEQ ID NO: 3 | HCDR3 (COMBINED) | RGEFLYYGINYYYEDV |
| SEQ ID NO: 7 | HCDR1 (IMGT) | GYTFTDYN |
| SEQ ID NO: 8 | HCDR2 (IMGT) | INPKYDIS |
| SEQ ID NO: 9 | HCDR3 (IMGT) | ARRGEFLYYGINYYYEDV |
| SEQ ID NO: 33 | VH | QVQLVQSGAEVVKPGASVKISCKASGYTETDYNMDWVKQA |
| | | PGQRLEWIGDINPKYDISTYNQQFKGKATITVDTSASTAY |
| | | MELSSLRSEDTAVYYCARRGEFLYYGINYYYFDVWGQGTL |
| | | VTVSS |
| SEQ ID NO: 34 | VH DNA | CAGGTGCAGCTGGTGCAGTCTGGCGCCGAGGTGGTGAAAC |
| | | CTGGCGCCTCCGTGAAGATCTCCTGCAAGGCCTCCGGCTA |
| | | CACCTTCACCGACTACAACATGGACTGGGTGAAACAGGCC |
| | | CCTGGCCAGCGGCTGGAATGGATCGGCGACATCAACCCTA |
| | | AGTACGACATCTCCACCTACAACCAGCAGTTCAAGGGCAA |
| | | GGCCACCATCACCGTGGACACCTCCGCCTCCACCGCCTAC |
| | | ATGGAACTGTCCTCCCTGCGGAGCGAGGACACCGCCGTGT |
| | | ACTACTGCGCCAGACGGGGCTTCTTCCTGTACTACGGCAT |
| | | CAACTACTACTACTTCGACGTGTGGGGCCAGGGCACCCTG |
| | | GTGACAGTGTCCTCC |
| SEQ ID NO: 35 | HC | QVQLVQSGAEVVKPGASVKISCKASGYTFTDYNMDWVKQA |
| | | PGQRLEWIGDINPKYDISTYNQQFKGKATITVDTSASTAY |
| | | MELSSLRSEDTAVYYCARRGFFLYYGINYYYPDVVVGQGT |
| | | LVTVSSASTKGPSVFPLAPSSKSTSGGTAALGCLVKDYFP |
| | | EPVTVSWNSGALTSGVHTFPAVLQSSGLYSLSSVVTVPSS |
| | | SLGTQTYICNVNHKPSNTKVDKRVEPKSCDKTHTCPPCPA |
| | | PELLGGPSVFLFPPKPKDTLMISRTPEVTCVVVDVSHEDP |
| | | EVKFNVVYVDGVEVHNAKTKPREEQYNSTYRVVSVLTVLH |
| | | QDWLNGKEYKCKVSNKALPAPIEKTISKAKGQPREPQVYT |
| | | LPPSREEMTKNQVSLTCLVKGFYPSDIAVEWESNGQPENN |
| | | YKTTPPVLDSDGSFFLYSKLTVDKSRWQQGNVFSCSVMHE |
| | | ALHNHYTQKSLSLSPGK |
| SEQ ID NO: 36 | HC DNA | CAGGTGCAGCTGGTGCAGTCTGGCGCCGAGGTGGTGAAAC |
| | | CTGGCGCCTCCGTGAAGATCTCCTGCAAGGCCTCCGGCTA |
| | | CACCTTCACCGACTACAACATGGACTGGGTGAAACAGGCC |
| | | CCTGGCCAGCGGCTGGAATGGATCGGCGACATCAACCCTA |
| | | AGTACGACATCTCCACCTACAACCAGCAGTTCAAGGGCAA |
| | | GGCCACCATCACCGTGGACACCTCCGCCTCCACCGCCTAC |
| | | ATGGAACTGTCCTCCCTGCGGAGCGAGGACACCGCCGTGT |
| | | ACTACTGCGCCAGACGGGGCTTCTTCCTGTACTACGGCAT |
| | | CAACTACTACTACTTCGACGTGTGGGGCCAGGGCACCCTG |
| | | GTGACAGTGTCCTCCGCTAGCACCAAGGGCCCAAGTGTGT |
| | | TTCCCCTGGCCCCCAGCAGCAAGTCTACTTCCGGCGGAAC |
| | | TGCTGCCCTGGGTTGCCTGGTGAAGGACTACTTCCCCGAG |
| | | CCCGTGACAGTGTCCTGGAACTCTGGGGCTCTGACTTCCG |
| | | GCGTGCACACCTTCCCCGCCGTGCTGCAGAGCAGCGGCCT |
| | | GTACAGCCTGAGCAGCGTGGTGACAGTGCCCTCCAGCTCT |
| | | CTGGGAACCCAGACCTATATCTGCAACGTGAACCACAAGC |
| | | CCAGCAACACCAAGGTGGACAAGAGAGTGGAGCCCAAGAG |
| | | CTGCGACAAGACCCACACCTGCCCCCCCTGCCCAGCTCCA |
| | | GAACTGCTGGGAGGGCCTTCCGTGTTCCTGTTCCCCCCCA |
| | | AGCCCAAGGACACCCTGATGATCAGCAGGACCCCCGAGGT |
| | | GACCTGCGTGGTGGTGGACGTGTCCCACGAGGACCCAGAG |
| | | GTGAAGTTCAACTGGTACGTGGACGGCGTGGAGGTGCACA |
| | | ACGCCAAGACCAAGCCCAGAGAGGAGCAGTACAACAGCAC |
| | | CTACAGGGTGGTGTCCGTGCTGACCGTGCTGCACCAGGAC |
| | | TGGCTGAACGGCAAAGAATACAAGTGCAAAGTCTCCAACA |
| | | AGGCCCTGCCAGCCCCAATCGAAAAGACAATCAGCAAGGC |
| | | CAAGGGCCAGCCACGGGAGCCCCAGGTGTACACCCTGCCC |
| | | CCCAGCCGGGAGGAGATGACCAAGAACCAGGTGTCCCTGA |
| | | CCTGTCTGGTGAAGGGCTTCTACCCCAGCGATATCGCCGT |
| | | GGAGTGGGAGAGCAACGGCCAGCCCGAGAACAACTACAAG |
| | | ACCACCCCCCCAGTGCTGGACAGCGACGGCAGCTTCTTCC |
| | | TGTACAGCAAGCTGACCGTGGACAAGTCCAGGTGGCAGCA |
| | | GGGCAACGTGTTCAGCTGCAGCGTGATGCACGAGGCCCTG |
| | | CACAACCACTACACCCAGAAGTCCCTGAGCCTGAGCCCCG |
| | | GCAAG |
| SEQ ID NO: 14 | LCDR1 (KABAT) | SASSSVSYIEI |
| SEQ ID NO: 15 | LCDR2 (KABAT) | STSNLAS |
| SEQ ID NO: 16 | LCDR3 (KABAT) | HQWSSYPWT |
| SEQ ID NO: 17 | LCDR1 (CHOTHIA) | SSSVSY |
| SEQ ID NO: 18 | LCDR2 (CHOTHIA) | STS |
| SEQ ID NO: 19 | LCDR3 (CHOTHIA) | WSSYPW |
| SEQ ID NO: 14 | LCDR1 (COMBINED) | SASSSVSYIH |
| SEQ ID NO: 15 | LCDR2 (COMBINED) | STSNLAS |
| SEQ ID NO: 16 | LCDR3 (COMBINED) | HQWSSYPWT |
| SEQ ID NO: 20 | LCDR1 (IMGT) | SSVSY |
| SEQ ID NO: 18 | LCDR2 (IMGT) | STS |
| SEQ ID NO: 16 | LCDR3 (IMGT) | HQWSSYPWT |
| SEQ ID NO: 29 | VL | EIVLTQSPATLSASPGERITLSCSASSSVSYIHWYQQKPG |
| | | QAPRLLIYSTSNLASGIPARFSGSGSGTFYTLTISSVEPE |
| | | DAAVYYCHQWSSYPWTFGGGTKLEIK |
| SEQ ID NO: 30 | VL DNA | GAGATCGTGCTGACCCAGTCCCCTGCCACCCTGTCTGCCA |
| | | GCCCTGGCGAGCGGATCACCCTGTCCTGCTCCGCCTCCTC |
| | | CTCCGTGTCCTACATCCACTGGTATCAGCAGAAGCCCGGC |
| | | CAGGCCCCTCGGCTGCTGATCTACTCCACCTCCAACCTGG |
| | | CCTCCGGCATCCCTGCCAGATTCTCCGGCTCTGGCTCCGG |
| | | CACCTTTTACACCCTGACCATCTCCAGCGTGGAACCCGAG |
| | | GACGCCGCCGTGTACTACTGCCACCAGTGGTCCAGCTACC |
| | | CCTGGACCTTCGGCGGAGGCACCAAGCTGGAAATCAAG |
| SEQ ID NO: 31 | LC | EIVLTQSPATLSASPGERITLSCSASSSVSYIHWYQQKPG |
| | | QAPRLLIYSTSNLASGIPARFSGSGSGTFYTLTISSVEPE |
| | | DAAVYYCHQWSSYPWTFGGGTKLEIKRTVAAPSVFIFPPS |
| | | DEQLKSGTASVVCLLNNFYPREAKVQWKVDNALQSGNSQE |
| | | SVTEQDSKDSTYSLSSTLTLSKADYEKHKVYACEVTHQGL |
| | | SSPVTKSFNRGEC |
| SEQ ID NO: 32 | LC DNA | GAGATCGTGCTGACCCAGTCCCCTGCCACCCTGTCTGCCA |
| | | GCCCTGGCGAGCGGATCACCCTGTCCTGCTCCGCCTCCTC |
| | | CTCCGTGTCCTACATCCACTGGTATCAGCAGAAGCCCGGC |
| | | CAGGCCCCTCGGCTGCTGATCTACTCCACCTCCAACCTGG |
| | | CCTCCGGCATCCCTGCCAGATTCTCCGGCTCTGGCTCCGG |
| | | CACCTTTTACACCCTGACCATCTCCAGCGTGGAACCCGAG |
| | | GACGCCGCCGTGTACTACTGCCACCAGTGGTCCAGCTACC |
| | | CCTGGACCTTCGGCGGAGGCACCAAGCTGGAAATCAAGCG |
| | | TACGGTGGCCGCTCCCAGCGTGTTCATCTTCCCCCCCAGC |
| | | GACGAGCAGCTGAAGAGTGGCACCGCCAGCGTGGTGTGCC |
| | | TGCTGAACAACTTCTACCCCCGGGAGGCCAAGGTGCAGTG |
| | | GAAGGTGGACAACGCCCTGCAGAGCGGCAACAGCCAGGAG |
| | | AGCGTCACCGAGCAGGACAGCAAGGACTCCACCTACAGCC |
| | | TGAGCAGCACCCTGACCCTGAGCAAGGCCGACTACGAGAA |
| | | GCATAAGGTGTACGCCTGCGAGGTGACCCACCAGGGCCTG |
| | | TCCAGCCCCGTGACCAAGAGCTTCAACAGGGGCGAGTGC |
| ANTI-HUMAN | | |
| ENTPD2 MAB4 | | |
| SEQ ID NO: 37 | HCDR1 (KABAT) | SGYYWN |
| SEQ ID NO: 38 | HCDR2 (KABAT) | YISYDADNNYNPSLKN |
| SEQ ID NO: 39 | HCDR3 (KABAT) | GYYRYGLGSYRGSYYYVMDY |
| SEQ ID NO: 40 | HCDR1 (CHOTHIA) | GYSITSGY |
| SEQ ID NO: 41 | HCDR2 (CHOTHIA) | SYDAD |
| SEQ ID NO: 39 | HCDR3 (CHOTHIA) | GYYRYGLGSYRGSYYYVMDY |
| SEQ ID NO: 42 | HCDR1 (COMBINED) | GYSITSGYYWN |
| SEQ ID NO: 38 | HCDR2 (COMBINED) | YISYDADNNYNPSLKN |
| SEQ ID NO: 39 | HCDR3 (COMBINED) | GYYRYGLGSYRGSYYYVMDY |
| SEQ ID NO: 43 | HCDR1 (IMGT) | GYSITSGYY |
| SEQ ID NO: 44 | HCDR2 (IMGT) | ISYDADN |
| SEQ ID NO: 45 | HCDR3 (IMGT) | AGGYYRYGLGSYRGSYYYVMDY |
| SEQ ID NO: 46 | VH | QIQLQESGPGLVKPSQTLSLTCTVSGYSITSGYYVVNWIR |
| | | QHPGKGLEWIGYISYDADNNYNPSLKNRVTISRDTSKNQF |
| | | SLKLSSVTAADTAVYYCAGGYYRYGLGSYRGSYYYVMDYW |
| | | GQGTTVTVSS |
| SEQ ID NO: 47 | VH DNA | CAGATCCAGCTGCAGGAATCTGGCCCTGGCCTGGTGAAAC |
| | | CCTCCCAGACCCTGTCCCTGACCTGCACCGTGTCCGGCTA |
| | | CTCCATCACCTCCGGCTACTACTGGAACTGGATCCGGCAG |
| | | CACCCCGGCAAGGGCCTGGAATGGATCGGCTACATCTCCT |
| | | ACGACGCTGACAACAACTACAACCCCAGCCTGAAGAACAG |
| | | AGTGACCATCTCCCGGGACACCTCCAAGAACCAGTTCTCC |
| | | CTGAAGCTGTCCTCCGTGACCGCCGCTGACACCGCCGTGT |
| | | ACTACTGCGCTGGCGGCTACTACAGATACGGCCTGGGCTC |
| | | CTACCGGGGCTCCTACTACTACGTGATGGACTACTGGGGC |
| | | CAGGGCACCACCGTGACCGTGTCCTCT |
| SEQ ID NO: 48 | HC | QIQLQESGPGLVKPSQTLSLTCTVSGYSITSGYYVVNWIR |
| | | QHPGKGLEWIGYISYDADNNYNPSLKNRVTISRDTSKNQF |
| | | SLKLSSVTAADTAVYYCAGGYYRYGLGSYRGSYYYVMDYW |
| | | GQGTTVTVSSASTKGPSVFPLAPSSKSTSGGTAALGCLVK |
| | | DYFPEPVTVSWNSGALTSGVHTFPAVLQSSGLYSLSSVVT |
| | | VPSSSLGTQTYICNVNHKPSNTKVDKRVEPKSCDKTHTCP |
| | | PCPAPELLGGPSVFLFPPKPKDTLMISRTPEVTCVVVDVS |
| | | HEDPEVKFNWYVDGVEVHNAKTKPREEQYNSTYRVVSVLT |
| | | VLHQDWLNGKEYKCKVSNKALPAPIEKTISKAKGQPREPQ |
| | | VYTLPPSREEMTKNQVSLTCLVKGFYPSDIAVEWESNGQP |
| | | ENNYKTTPPVLDSDGSFFLYSKLTVDKSRWQQGNVFSCSV |
| | | MHEALHNHYTQKSLSLSPGK |
| SEQ ID NO: 49 | HC DNA | CAGATCCAGCTGCAGGAATCTGGCCCTGGCCTGGTGAAAC |
| | | CCTCCCAGACCCTGTCCCTGACCTGCACCGTGTCCGGCTA |
| | | CTCCATCACCTCCGGCTACTACTGGAACTGGATCCGGCAG |
| | | CACCCCGGCAAGGGCCTGGAATGGATCGGCTACATCTCCT |
| | | ACGACGCTGACAACAACTACAACCCCAGCCTGAAGAACAG |
| | | AGTGACCATCTCCCGGGACACCTCCAAGAACCAGTTCTCC |
| | | CTGAAGCTGTCCTCCGTGACCGCCGCTGACACCGCCGTGT |
| | | ACTACTGCGCTGGCGGCTACTACAGATACGGCCTGGGCTC |
| | | CTACCGGGGCTCCTACTACTACGTGATGGACTACTGGGGC |
| | | CAGGGCACCACCGTGACCGTGTCCTCTGCTAGCACCAAGG |
| | | GCCCAAGTGTGTTTCCCCTGGCCCCCAGCAGCAAGTCTAC |
| | | TTCCGGCGGAACTGCTGCCCTGGGTTGCCTGGTGAAGGAC |
| | | TACTTCCCCGAGCCCGTGACAGTGTCCTGGAACTCTGGGG |
| | | CTCTGACTTCCGGCGTGCACACCTTCCCCGCCGTGCTGCA |
| | | GAGCAGCGGCCTGTACAGCCTGAGCAGCGTGGTGACAGTG |
| | | CCCTCCAGCTCTCTGGGAACCCAGACCTATATCTGCAACG |
| | | TGAACCACAAGCCCAGCAACACCAAGGTGGACAAGAGAGT |
| | | GGAGCCCAAGAGCTGCGACAAGACCCACACCTGCCCCCCC |
| | | TGCCCAGCTCCAGAACTGCTGGGAGGGCCTTCCGTGTTCC |
| | | TGTTCCCCCCCAAGCCCAAGGACACCCTGATGATCAGCAG |
| | | GACCCCCGAGGTGACCTGCGTGGTGGTGGACGTGTCCCAC |
| | | GAGGACCCAGAGGTGAAGTTCAACTGGTACGTGGACGGCG |
| | | TGGAGGTGCACAACGCCAAGACCAAGCCCAGAGAGGAGCA |
| | | GTACAACAGCACCTACAGGGTGGTGTCCGTGCTGACCGTG |
| | | CTGCACCAGGACTGGCTGAACGGCAAAGAATACAAGTGCA |
| | | AAGTCTCCAACAAGGCCCTGCCAGCCCCAATCGAAAAGAC |
| | | AATCAGCAAGGCCAAGGGCCAGCCACGGGAGCCCCAGGTG |
| | | TACACCCTGCCCCCCAGCCGGGAGGAGATGACCAAGAACC |
| | | AGGTGTCCCTGACCTGTCTGGTGAAGGGCTTCTACCCCAG |
| | | CGATATCGCCGTGGAGTGGGAGAGCAACGGCCAGCCCGAG |
| | | AACAACTACAAGACCACCCCCCCAGTGCTGGACAGCGACG |
| | | GCAGCTTCTTCCTGTACAGCAAGCTGACCGTGGACAAGTC |
| | | CAGGTGGCAGCAGGGCAACGTGTTCAGCTGCAGCGTGATG |
| | | CACGAGGCCCTGCACAACCACTACACCCAGAAGTCCCTGA |
| | | GCCTGAGCCCCGGCAAG |
| SEQ ID NO: 50 | LCDR1 (KABAT) | KASQSVDYEGHSYMN |
| SEQ ID NO: 51 | LCDR2 (KABAT) | AASNLES |
| SEQ ID NO: 52 | LCDR3 (KABAT) | QQSNEDPPT |
| SEQ ID NO: 53 | LCDR1 (CHOTHIA) | SQSVDYEGHSY |
| SEQ ID NO: 54 | LCDR2 (CHOTHIA) | AAS |
| SEQ ID NO: 55 | LCDR3 (CHOTHIA) | SNEDPP |
| SEQ ID NO: 50 | LCDR1 (COMBINED) | KASQSVDYEGHSYMN |
| SEQ ID NO: 51 | LCDR2 (COMBINED) | AASNLES |
| SEQ ID NO: 52 | LCDR3 (COMBINED) | QQSNEDPPT |
| SEQ ID NO: 56 | LCDR1 (IMGT) | QSVDYEGHSY |
| SEQ ID NO: 54 | LCDR2 (IMGT) | AAS |
| SEQ ID NO: 52 | LCDR3 (IMGT) | QQSNEDPPT |
| SEQ ID NO: 57 | VL | ETVLTQSPATLSVSPGERATISCKASQSVDYEGHSYMNWY |
| | | QQKPGQAPRLLIYAASNLESGIPARFSGSGSGTDFTLTIS |
| | | SVEPEDAATYYCQQSNEDPPTFGGGTKLEIK |
| SEQ ID NO: 58 | VL DNA | GAGACAGTGCTGACCCAGTCCCCTGCCACCCTGTCCGTGT |
| | | CTCCCGGCGAGAGAGCCACCATCAGCTGCAAGGCCTCCCA |
| | | GTCCGTGGACTACGAAGGCCATTCCTACATGAACTGGTAT |
| | | CAGCAGAAGCCCGGCCAGGCCCCTCGGCTGCTGATCTACG |
| | | CCGCCTCCAACCTGGAATCCGGCATCCCTGCCCGGTTCTC |
| | | CGGCTCTGGCTCTGGCACCGACTTCACCCTGACCATCTCC |
| | | AGCGTGGAACCCGAGGACGCCGCCACCTACTACTGCCAGC |
| | | AGTCCAACGAGGACCCCCCCACCTTCGGCGGAGGCACCAA |
| | | GCTGGAAATCAAG |
| SEQ ID NO: 59 | LC | ETVLTQSPATLSVSPGERATISCKASQSVDYEGHSYMNWY |
| | | QQKPGQAPRLLIYAASNLESGIPARFSGSGSGTDFTLTIS |
| | | SVEPEDAATYYCQQSNEDPPTFGGGTKLEIKRTVAAPSVF |
| | | IFPPSDEQLKSGTASVVCLLNNFYPREAKVQWKVDNALQS |
| | | GNSQESVTEQDSKDSTYSLSSTLTLSKADYEKHKVYACEV |
| | | THQGLSSPVTKSFNRGEC |
| SEQ ID NO: 60 | LC DNA | GAGACAGTGCTGACCCAGTCCCCTGCCACCCTGTCCGTGT |
| | | CTCCCGGCGAGAGAGCCACCATCAGCTGCAAGGCCTCCCA |
| | | GTCCGTGGACTACGAAGGCCATTCCTACATGAACTGGTAT |
| | | CAGCAGAAGCCCGGCCAGGCCCCTCGGCTGCTGATCTACG |
| | | CCGCCTCCAACCTGGAATCCGGCATCCCTGCCCGGTTCTC |
| | | CGGCTCTGGCTCTGGCACCGACTTCACCCTGACCATCTCC |
| | | AGCGTGGAACCCGAGGACGCCGCCACCTACTACTGCCAGC |
| | | AGTCCAACGAGGACCCCCCCACCTTCGGCGGAGGCACCAA |
| | | GCTGGAAATCAAGCGTACGGTGGCCGCTCCCAGCGTGTTC |
| | | ATCTTCCCCCCCAGCGACGAGCAGCTGAAGAGTGGCACCG |
| | | CCAGCGTGGTGTGCCTGCTGAACAACTTCTACCCCCGGGA |
| | | GGCCAAGGTGCAGTGGAAGGTGGACAACGCCCTGCAGAGC |
| | | GGCAACAGCCAGGAGAGCGTCACCGAGCAGGACAGCAAGG |
| | | ACTCCACCTACAGCCTGAGCAGCACCCTGACCCTGAGCAA |
| | | GGCCGACTACGAGAAGCATAAGGTGTACGCCTGCGAGGTG |
| | | ACCCACCAGGGCCTGTCCAGCCCCGTGACCAAGAGCTTCA |
| | | ACAGGGGCGAGTGC |
| ANTI-HUMAN | | |
| ENTPD2 MAB5 | | |
| SEQ ID NO: 37 | HCDR1 (KABAT) | SGYYWN |
| SEQ ID NO: 38 | HCDR2 (KABAT) | YISYDADNNYNPSLKN |
| SEQ ID NO: 39 | HCDR3 (KABAT) | GYYRYGLGSYRGSYYYVMDY |
| SEQ ID NO: 40 | HCDR1 (CHOTHIA) | GYSITSGY |
| SEQ ID NO: 41 | HCDR2 (CHOTHIA) | SYDAD |
| SEQ ID NO: 39 | HCDR3 (CHOTHIA) | GYYRYGLGSYRGSYYYVMDY |
| SEQ ID NO: 42 | HCDR1 (COMBINED) | GYSITGYYWN |
| SEQ ID NO: 38 | HCDR2 (COMBINED) | YISYDADNNYNPSLKN |
| SEQ ID NO: 39 | HCDR3 (COMBINED) | GYYRYGLGSYRGSYYYVMDY |
| SEQ ID NO: 43 | HCDR1 (IMGT) | GYSITSGYY |
| SEQ ID NO: 44 | HCDR2 (IMGT) | ISYDADN |
| SEQ ID NO: 45 | HCDR3 (IMGT) | AGGYYRYGLGSYRGSYYYVMDY |
| SEQ ID NO: 46 | VH | QIQLQESGPGLVKPSQTLSLTCTVSGYSITSGYYVVNWIR |
| | | QHPGKGLEWIGYISYDADNNYNPSLKNRVTISRDTSKNQF |
| | | SLKLSSVTAADTAVYYCAGGYYRYGLGSYRGSYYYVMDYW |
| | | GQGTTVTVSS |
| SEQ ID NO: 47 | VH DNA | CAGATCCAGCTGCAGGAATCTGGCCCTGGCCTGGTGAAAC |
| | | CCTCCCAGACCCTGTCCCTGACCTGCACCGTGTCCGGCTA |
| | | CTCCATCACCTCCGGCTACTACTGGAACTGGATCCGGCAG |
| | | CACCCCGGCAAGGGCCTGGAATGGATCGGCTACATCTCCT |
| | | ACGACGCTGACAACAACTACAACCCCAGCCTGAAGAACAG |
| | | AGTGACCATCTCCCGGGACACCTCCAAGAACCAGTTCTCC |
| | | CTGAAGCTGTCCTCCGTGACCGCCGCTGACACCGCCGTGT |
| | | ACTACTGCGCTGGCGGCTACTACAGATACGGCCTGGGCTC |
| | | CTACCGGGGCTCCTACTACTACGTGATGGACTACTGGGGC |
| | | CAGGGCACCACCGTGACCGTGTCCTCT |
| SEQ ID NO: 48 | HC | QIQLQESGPGLVKPSQTLSLTCTVSGYSITSGYYVVNWIR |
| | | QHPGKGLEWIGYISYDADNNYNPSLKNRVTISRDTSKNQF |
| | | SLKLSSVTAADTAVYYCAGGYYRYGLGSYRGSYYYVMDYW |
| | | GQGTTVTVSSASTKGPSVFPLAPSSKSTSGGTAALGCLVK |
| | | DYFPEPVTVSWNSGALTSGVHTFPAVLQSSGLYSLSSVVT |
| | | VPSSSLGTQTYICNVNHKPSNTKVDKRVEPKSCDKTHTCP |
| | | PCPAPELLGGPSVFLFPPKPKDTLMISRTPEVTCVVVDVS |
| | | HEDPEVKFNWYVDGVEVHNAKTKPREEQYNSTYRVVSVLT |
| | | VLHQDWLNGKEYKCKVSNKALPAPIEKTISKAKGQPREPQ |
| | | VYTLPPSREEMTKNQVSLTCLVKGFYPSDIAVEWESNGQP |
| | | ENNYKTTPPVLDSDGSFFLYSKLTVDKSRWQQGNVFSCSV |
| | | MHEALHNHYTQKSLSLSPGK |
| SEQ ID NO: 49 | HC DNA | CAGATCCAGCTGCAGGAATCTGGCCCTGGCCTGGTGAAAC |
| | | CCTCCCAGACCCTGTCCCTGACCTGCACCGTGTCCGGCTA |
| | | CTCCATCACCTCCGGCTACTACTGGAACTGGATCCGGCAG |
| | | CACCCCGGCAAGGGCCTGGAATGGATCGGCTACATCTCCT |
| | | ACGACGCTGACAACAACTACAACCCCAGCCTGAAGAACAG |
| | | AGTGACCATCTCCCGGGACACCTCCAAGAACCAGTTCTCC |
| | | CTGAAGCTGTCCTCCGTGACCGCCGCTGACACCGCCGTGT |
| | | ACTACTGCGCTGGCGGCTACTACAGATACGGCCTGGGCTC |
| | | CTACCGGGGCTCCTACTACTACGTGATGGACTACTGGGGC |
| | | CAGGGCACCACCGTGACCGTGTCCTCTGCTAGCACCAAGG |
| | | GCCCAAGTGTGTTTCCCCTGGCCCCCAGCAGCAAGTCTAC |
| | | TTCCGGCGGAACTGCTGCCCTGGGTTGCCTGGTGAAGGAC |
| | | TACTTCCCCGAGCCCGTGACAGTGTCCTGGAACTCTGGGG |
| | | CTCTGACTTCCGGCGTGCACACCTTCCCCGCCGTGCTGCA |
| | | GAGCAGCGGCCTGTACAGCCTGAGCAGCGTGGTGACAGTG |
| | | CCCTCCAGCTCTCTGGGAACCCAGACCTATATCTGCAACG |
| | | TGAACCACAAGCCCAGCAACACCAAGGTGGACAAGAGAGT |
| | | GGAGCCCAAGAGCTGCGACAAGACCCACACCTGCCCCCCC |
| | | TGCCCAGCTCCAGAACTGCTGGGAGGGCCTTCCGTGTTCC |
| | | TGTTCCCCCCCAAGCCCAAGGACACCCTGATGATCAGCAG |
| | | GACCCCCGAGGTGACCTGCGTGGTGGTGGACGTGTCCCAC |
| | | GAGGACCCAGAGGTGAAGTTCAACTGGTACGTGGACGGCG |
| | | TGGAGGTGCACAACGCCAAGACCAAGCCCAGAGAGGAGCA |
| | | GTACAACAGCACCTACAGGGTGGTGTCCGTGCTGACCGTG |
| | | CTGCACCAGGACTGGCTGAACGGCAAAGAATACAAGTGCA |
| | | AAGTCTCCAACAAGGCCCTGCCAGCCCCAATCGAAAAGAC |
| | | AATCAGCAAGGCCAAGGGCCAGCCACGGGAGCCCCAGGTG |
| | | TACACCCTGCCCCCCAGCCGGGAGGAGATGACCAAGAACC |
| | | AGGTGTCCCTGACCTGTCTGGTGAAGGGCTTCTACCCCAG |
| | | CGATATCGCCGTGGAGTGGGAGAGCAACGGCCAGCCCGAG |
| | | AACAACTACAAGACCACCCCCCCAGTGCTGGACAGCGACG |
| | | GCAGCTTCTTCCTGTACAGCAAGCTGACCGTGGACAAGTC |
| | | CAGGTGGCAGCAGGGCAACGTGTTCAGCTGCAGCGTGATG |
| | | CACGAGGCCCTGCACAACCACTACACCCAGAAGTCCCTGA |
| | | GCCTGAGCCCCGGCAAG |
| SEQ ID NO: 61 | LCDR1 (KABAT) | KASQSVDYDGNSYMN |
| SEQ ID NO: 51 | LCDR2 (KABAT) | AASNLES |
| SEQ ID NO: 52 | LCDR3 (KABAT) | QQSNEDPPT |
| SEQ ID NO: 62 | LCDR1 (CHOTHIA) | SQSVDYDGNSY |
| SEQ ID NO: 54 | LCDR2 (CHOTHIA) | AAS |
| SEQ ID NO: 55 | LCDR3 (CHOTHIA) | SNEDPP |
| SEQ ID NO: 61 | LCDR1 (COMBINED) | KASQSVDYDGNSYMN |
| SEQ ID NO: 51 | LCDR2 (COMBINED) | AASNLES |
| SEQ ID NO: 52 | LCDR3 (COMBINED) | QQSNEDPPT |
| SEQ ID NO: 63 | LCDR1 (IMGT) | QSVDYDGNSY |
| SEQ ID NO: 54 | LCDR2 (IMGT) | AAS |
| SEQ ID NO: 52 | LCDR3 (IMGT) | QQSNEDPPT |
| SEQ ID NO: 64 | VL | ETVLTQSPATLSVSPGERATISCKASQSVDYDGNSYMNWY |
| | | QQKPGQAPRLLIYAASNLESGIPARFSGSGSGTDFTLTIS |
| | | SVEPEDAATYYCQQSNEDPPTFGGGTKLEIK |
| SEQ ID NO: 65 | VL DNA | GAGACAGTGCTGACCCAGTCCCCTGCCACCCTGTCCGTGT |
| | | CTCCCGGCGAGAGAGCCACCATCAGCTGCAAGGCCTCCCA |
| | | GTCCGTGGACTACGACGGCAACTCCTACATGAACTGGTAT |
| | | CAGCAGAAGCCCGGCCAGGCCCCTCGGCTGCTGATCTACG |
| | | CCGCCTCCAACCTGGAATCCGGCATCCCTGCCCGGTTCTC |
| | | CGGCTCTGGCTCTGGCACCGACTTCACCCTGACCATCTCC |
| | | AGCGTGGAACCCGAGGACGCCGCCACCTACTACTGCCAGC |
| | | AGTCCAACGAGGACCCCCCCACCTTCGGCGGAGGCACCAA |
| | | GCTGGAAATCAAG |
| SEQ ID NO: 66 | LC | ETVLTQSPATLSVSPGERATISCKASQSVDYDGNSYMNWY |
| | | QQKPGQAPRLLIYAASNLESGIPARFSGSGSGTDFTLTIS |
| | | SVEPEDAATYYCQQSNEDPPTFGGGTKLEIKRTVAAPSVF |
| | | IFPPSDEQLKSGTASVVCLLNNFYPREAKVQWKVDNALQS |
| | | GNSQESVTEQDSKDSTYSLSSTLTLSKADYEKHKVYACEV |
| | | THQGLSSPVTKSFNRGEC |
| SEQ ID NO: 67 | LC DNA | GAGACAGTGCTGACCCAGTCCCCTGCCACCCTGTCCGTGT |
| | | CTCCCGGCGAGAGAGCCACCATCAGCTGCAAGGCCTCCCA |
| | | GTCCGTGGACTACGACGGCAACTCCTACATGAACTGGTAT |
| | | CAGCAGAAGCCCGGCCAGGCCCCTCGGCTGCTGATCTACG |
| | | CCGCCTCCAACCTGGAATCCGGCATCCCTGCCCGGTTCTC |
| | | CGGCTCTGGCTCTGGCACCGACTTCACCCTGACCATCTCC |
| | | AGCGTGGAACCCGAGGACGCCGCCACCTACTACTGCCAGC |
| | | AGTCCAACGAGGACCCCCCCACCTTCGGCGGAGGCACCAA |
| | | GCTGGAAATCAAGCGTACGGTGGCCGCTCCCAGCGTGTTC |
| | | ATCTTCCCCCCCAGCGACGAGCAGCTGAAGAGTGGCACCG |
| | | CCAGCGTGGTGTGCCTGCTGAACAACTTCTACCCCCGGGA |
| | | GGCCAAGGTGCAGTGGAAGGTGGACAACGCCCTGCAGAGC |
| | | GGCAACAGCCAGGAGAGCGTCACCGAGCAGGACAGCAAGG |
| | | ACTCCACCTACAGCCTGAGCAGCACCCTGACCCTGAGCAA |
| | | GGCCGACTACGAGAAGCATAAGGTGTACGCCTGCGAGGTG |
| | | ACCCACCAGGGCCTGTCCAGCCCCGTGACCAAGAGCTTCA |
| | | ACAGGGGCGAGTGC |
| ANTI-HUMAN | | |
| ENTPD2 MAB6 | | |
| SEQ ID NO: 37 | HCDR1 (KABAT) | SGYYWN |
| SEQ ID NO: 38 | HCDR2 (KABAT) | YISYDADNNYNPSLKN |
| SEQ ID NO: 68 | HCDR3 (KABAT) | GYYRYGLGSYSGSYYYVMDY |
| SEQ ID NO: 40 | HCDR1 (CHOTHIA) | GYSITSGY |
| SEQ ID NO: 41 | HCDR2 (CHOTHIA) | SYDAD |
| SEQ ID NO: 68 | HCDR3 (CHOTHIA) | GYYRYGLGSYSGSYYYVMDY |
| SEQ ID NO: 42 | HCDR1 (COMBINED) | GYSITSGYYWN |
| SEQ ID NO: 38 | HCDR2 (COMBINED) | YISYDADNNYNPSLKN |
| SEQ ID NO: 68 | HCDR3 (COMBINED) | GYYRYGLGSYSGSYYYVMDY |
| SEQ ID NO: 43 | HCDR1 (IMGT) | GYSITSGYY |
| SEQ ID NO: 44 | HCDR2 (IMGT) | ISYDADN |
| SEQ ID NO: 69 | HCDR3 (IMGT) | AGGYYRYGLGSYSGSYYYVMDY |
| SEQ ID NO: 70 | VH | QVQLQESGPGLVKPSQTLSLTCTVSGYSITSGYYWNWIRQ |
| | | HPGKGLEWMGYISYDADNNYNPSLKNRITISRDTSKNQFS |
| | | LKLSSVTAADTAVYYCAGGYYRYGLGSYSGSYYYVMDYWG |
| | | QGTTVTVSS |
| SEQ ID NO: 71 | VH DNA | CAGGTGCAGCTGCAGGAATCTGGCCCTGGCCTGGTGAAAC |
| | | CCTCCCAGACCCTGTCCCTGACCTGCACCGTGTCCGGCTA |
| | | CTCCATCACCTCCGGCTACTACTGGAACTGGATCCGGCAG |
| | | CACCCCGGCAAGGGCCTGGAATGGATGGGCTACATCTCCT |
| | | ACGACGCTGACAACAACTACAACCCCAGCCTGAAGAACAG |
| | | AATCACCATCTCCCGGGACACCTCCAAGAACCAGTTCTCC |
| | | CTGAAGCTGTCCTCCGTGACCGCCGCTGACACCGCCGTGT |
| | | ACTACTGCGCTGGCGGCTACTACAGATACGGCCTGGGCTC |
| | | CTACTCCGGCTCCTACTACTACGTGATGGACTACTGGGGC |
| | | CAGGGCACCACCGTGACCGTGTCCTCT |
| SEQ ID NO: 72 | HC | QVQLQESGPGLVKPSQTLSLTCTVSGYSITSGYYWNWIRQ |
| | | HPGKGLEWMGYISYDADNNYNPSLKNRITISRDTSKNQFS |
| | | LKLSSVTAADTAVYYCAGGYYRYGLGSYSGSYYYVMDYWG |
| | | QGTTVTVSSASTKGPSVFPLAPSSKSTSGGTAALGCLVKD |
| | | YFPEPVTVSWNSGALTSGVHTFPAVLQSSGLYSLSSVVTV |
| | | PSSSLGTQTYICNVNHKPSNTKVDKRVEPKSCDKTHTCPP |
| | | CPAPELLGGPSVFLFPPKPKDTLMISRTPEVTCVVVDVSH |
| | | EDPEVKFNWYVDGVEVHNAKTKPREEQYNSTYRVVSVLTV |
| | | LHQDWLNGKEYKCKVSNKALPAPIEKTISKAKGQPREPQV |
| | | YTLPPSREEMTKNQVSLTCLVKGFYPSDIAVEWESNGQPE |
| | | NNYKTTPPVLDSDGSFFLYSKLTVDKSRWQQGNVFSCSVM |
| | | HEALHNHYTQKSLSLSPGK |
| SEQ ID NO: 73 | HC DNA | CAGGTGCAGCTGCAGGAATCTGGCCCTGGCCTGGTGAAAC |
| | | CCTCCCAGACCCTGTCCCTGACCTGCACCGTGTCCGGCTA |
| | | CTCCATCACCTCCGGCTACTACTGGAACTGGATCCGGCAG |
| | | CACCCCGGCAAGGGCCTGGAATGGATGGGCTACATCTCCT |
| | | ACGACGCTGACAACAACTACAACCCCAGCCTGAAGAACAG |
| | | AATCACCATCTCCCGGGACACCTCCAAGAACCAGTTCTCC |
| | | CTGAAGCTGTCCTCCGTGACCGCCGCTGACACCGCCGTGT |
| | | ACTACTGCGCTGGCGGCTACTACAGATACGGCCTGGGCTC |
| | | CTACTCCGGCTCCTACTACTACGTGATGGACTACTGGGGC |
| | | CAGGGCACCACCGTGACCGTGTCCTCTGCTAGCACCAAGG |
| | | GCCCAAGTGTGTTTCCCCTGGCCCCCAGCAGCAAGTCTAC |
| | | TTCCGGCGGAACTGCTGCCCTGGGTTGCCTGGTGAAGGAC |
| | | TACTTCCCCGAGCCCGTGACAGTGTCCTGGAACTCTGGGG |
| | | CTCTGACTTCCGGCGTGCACACCTTCCCCGCCGTGCTGCA |
| | | GAGCAGCGGCCTGTACAGCCTGAGCAGCGTGGTGACAGTG |
| | | CCCTCCAGCTCTCTGGGAACCCAGACCTATATCTGCAACG |
| | | TGAACCACAAGCCCAGCAACACCAAGGTGGACAAGAGAGT |
| | | GGAGCCCAAGAGCTGCGACAAGACCCACACCTGCCCCCCC |
| | | TGCCCAGCTCCAGAACTGCTGGGAGGGCCTTCCGTGTTCC |
| | | TGTTCCCCCCCAAGCCCAAGGACACCCTGATGATCAGCAG |
| | | GACCCCCGAGGTGACCTGCGTGGTGGTGGACGTGTCCCAC |
| | | GAGGACCCAGAGGTGAAGTTCAACTGGTACGTGGACGGCG |
| | | TGGAGGTGCACAACGCCAAGACCAAGCCCAGAGAGGAGCA |
| | | GTACAACAGCACCTACAGGGTGGTGTCCGTGCTGACCGTG |
| | | CTGCACCAGGACTGGCTGAACGGCAAAGAATACAAGTGCA |
| | | AAGTCTCCAACAAGGCCCTGCCAGCCCCAATCGAAAAGAC |
| | | AATCAGCAAGGCCAAGGGCCAGCCACGGGAGCCCCAGGTG |
| | | TACACCCTGCCCCCCAGCCGGGAGGAGATGACCAAGAACC |
| | | AGGTGTCCCTGACCTGTCTGGTGAAGGGCTTCTACCCCAG |
| | | CGATATCGCCGTGGAGTGGGAGAGCAACGGCCAGCCCGAG |
| | | AACAACTACAAGACCACCCCCCCAGTGCTGGACAGCGACG |
| | | GCAGCTTCTTCCTGTACAGCAAGCTGACCGTGGACAAGTC |
| | | CAGGTGGCAGCAGGGCAACGTGTTCAGCTGCAGCGTGATG |
| | | CACGAGGCCCTGCACAACCACTACACCCAGAAGTCCCTGA |
| | | GCCTGAGCCCCGGCAAG |
| SEQ ID NO: 50 | LCDR1 (KABAT) | KASQSVDYEGHSYMN |
| SEQ ID NO: 51 | LCDR2 (KABAT) | AASNLES |
| SEQ ID NO: 52 | LCDR3 (KABAT) | QQSNEDPPT |
| SEQ ID NO: 53 | LCDR1 (CHOTHIA) | SQSVDYEGHSY |
| SEQ ID NO: 54 | LCDR2 (CHOTHIA) | AAS |
| SEQ ID NO: 55 | LCDR3 (CHOTHIA) | SNEDPP |
| SEQ ID NO: 50 | LCDR1 (COMBINED) | KASQSVDYEGHSYMN |
| SEQ ID NO: 51 | LCDR2 (COMBINED) | AASNLES |
| SEQ ID NO: 52 | LCDR3 (COMBINED) | QQSNEDPPT |
| SEQ ID NO: 56 | LCDR1 (IMGT) | QSVDYEGHSY |
| SEQ ID NO: 54 | LCDR2 (IMGT) | AAS |
| SEQ ID NO: 52 | LCDR3 (IMGT) | QQSNEDPPT |
| SEQ ID NO: 74 | VL | DTQMTQSPSSLSVSVGDRATITCKASQSVDYEGHSYMNWY |
| | | QQKPGKAPKLLIYAASNLESGVPSRFSGSGSGTDFTLTIS |
| | | SVQPEDFATYYCQQSNEDPPTFGGGTKLEIK |
| SEQ ID NO: 75 | VL DNA | GACACCCAGATGACCCAGTCCCCCTCCTCCCTGTCCGTGT |
| | | CCGTGGGCGACAGAGCCACCATCACATGCAAGGCCTCCCA |
| | | GTCCGTGGACTACGAAGGCCATTCCTACATGAACTGGTAT |
| | | CAGCAGAAGCCCGGCAAGGCCCCCAAGCTGCTGATCTACG |
| | | CCGCCTCCAACCTGGAATCCGGCGTGCCCTCCAGATTCTC |
| | | CGGCTCCGGCTCTGGCACCGACTTCACCCTGACCATCTCC |
| | | AGCGTGCAGCCCGAGGACTTCGCCACCTACTACTGCCAGC |
| | | AGTCCAACGAGGACCCCCCCACCTTCGGCGGAGGCACCAA |
| | | GCTGGAAATCAAG |
| SEQ ID NO: 76 | LC | DTQMTQSPSSLSVSVGDRATITCKASQSVDYEGHSYMNWY |
| | | QQKPGKAPKLLIYAASNLESGVPSRFSGSGSGTDFTLTIS |
| | | SVQPEDFATYYCQQSNEDPPTFGGGTKLEIKRTVAAPSVF |
| | | IFPPSDEQLKSGTASVVCLLNNFYPREAKVQWKVDNALQS |
| | | GNSQESVTEQDSKDSTYSLSSTLTLSKADYEKHKVYACEV |
| | | THQGLSSPVTKSFNRGEC |
| SEQ ID NO: 77 | LC DNA | GACACCCAGATGACCCAGTCCCCCTCCTCCCTGTCCGTGT |
| | | CCGTGGGCGACAGAGCCACCATCACATGCAAGGCCTCCCA |
| | | GTCCGTGGACTACGAAGGCCATTCCTACATGAACTGGTAT |
| | | CAGCAGAAGCCCGGCAAGGCCCCCAAGCTGCTGATCTACG |
| | | CCGCCTCCAACCTGGAATCCGGCGTGCCCTCCAGATTCTC |
| | | CGGCTCCGGCTCTGGCACCGACTTCACCCTGACCATCTCC |
| | | AGCGTGCAGCCCGAGGACTTCGCCACCTACTACTGCCAGC |
| | | AGTCCAACGAGGACCCCCCCACCTTCGGCGGAGGCACCAA |
| | | GCTGGAAATCAAGCGTACGGTGGCCGCTCCCAGCGTGTTC |
| | | ATCTTCCCCCCCAGCGACGAGCAGCTGAAGAGTGGCACCG |
| | | CCAGCGTGGTGTGCCTGCTGAACAACTTCTACCCCCGGGA |
| | | GGCCAAGGTGCAGTGGAAGGTGGACAACGCCCTGCAGAGC |
| | | GGCAACAGCCAGGAGAGCGTCACCGAGCAGGACAGCAAGG |
| | | ACTCCACCTACAGCCTGAGCAGCACCCTGACCCTGAGCAA |
| | | GGCCGACTACGAGAAGCATAAGGTGTACGCCTGCGAGGTG |
| | | ACCCACCAGGGCCTGTCCAGCCCCGTGACCAAGAGCTTCA |
| | | ACAGGGGCGAGTGC |
| ANTI-HUMAN | | |
| ENTPD2 MAB7 | | |
| SEQ ID NO: 1 | HCDR1 (KABAT) | DYNMD |
| SEQ ID NO: 2 | HCDR2 (KABAT) | DINPKYDISTYNQQFKG |
| SEQ ID NO: 3 | HCDR3 (KABAT) | RGEFLYYGINYYYFDV |
| SEQ ID NO: 4 | HCDR1 (CHOTHIA) | GYTFTDY |
| SEQ ID NO: 5 | HCDR2 (CHOTHIA) | NPKYDI |
| SEQ ID NO: 3 | HCDR3 (CHOTHIA) | RGEFLYYGINYYYFDV |
| SEQ ID NO: 6 | HCDR1 (COMBINED) | GYTFTDYNMD |
| SEQ ID NO: 2 | HCDR2 (COMBINED) | DINPKYDISTYNQQFKG |
| SEQ ID NO: 3 | HCDR3 (COMBINED) | RGEFLYYGINYYYFDV |
| SEQ ID NO: 7 | HCDR1 (IMGT) | GYTFTDYN |
| SEQ ID NO: 8 | HCDR2 (IMGT) | INPKYDIS |
| SEQ ID NO: 9 | HCDR3 (IMGT) | ARRGEFLYYGINYYYFDV |
| SEQ ID NO: 25 | VH | QVQLVQSGAEVVKPGASVKISCKASGYTFTDYNMDWVKQA |
| | | PGQRLEWIGDINPKYDISTYNQQFKGKATITVDKSASTAY |
| | | MELSSLRSEDTAVYYCARRGEFLYYGINYYYFDVVVGQGT |
| | | LVTVSS |
| SEQ ID NO: 26 | VH DNA | CAGGTGCAGCTGGTGCAGTCTGGCGCCGAGGTGGTGAAAC |
| | | CTGGCGCCTCCGTGAAGATCTCCTGCAAGGCCTCCGGCTA |
| | | CACCTTCACCGACTACAACATGGACTGGGTGAAACAGGCC |
| | | CCTGGCCAGCGGCTGGAATGGATCGGCGACATCAACCCTA |
| | | AGTACGACATCTCCACCTACAACCAGCAGTTCAAGGGCAA |
| | | GGCCACCATCACCGTGGACAAGTCCGCCTCCACCGCCTAC |
| | | ATGGAACTGTCCTCCCTGCGGAGCGAGGACACCGCCGTGT |
| | | ACTACTGCGCCAGACGGGGCTTCTTCCTGTACTACGGCAT |
| | | CAACTACTACTACTTCGACGTGTGGGGCCAGGGCACCCTG |
| | | GTGACAGTGTCCTCC |
| SEQ ID NO: 27 | HC | QVQLVQSGAEVVKPGASVKISCKASGYTFTDYNMDWVKQA |
| | | PGQRLEWIGDINPKYDISTYNQQFKGKATITVDKSASTAY |
| | | MELSSLRSEDTAVYYCARRGEFLYYGINYYYFDVWGQGTL |
| | | VTVSSASTKGPSVFPLAPSSKSTSGGTAALGCLVKDYFPE |
| | | PVTVSWNSGALTSGVHTFPAVLQSSGLYSLSSVVTVPSSS |
| | | LGTQTYICNVNHKPSNTKVDKRVEPKSCDKTHTCPPCPAP |
| | | ELLGGPSVFLFPPKPKDTLMISRTPEVTCVVVDVSHEDPE |
| | | VKFNVVYVDGVEVHNAKTKPREEQYNSTYRVVSVLTVLHQ |
| | | DWLNGKEYKCKVSNKALPAPIEKTISKAKGQPREPQVYTL |
| | | PPSREEMTKNQVSLTCLVKGFYPSDIAVEWESNGQPENNY |
| | | KTTPPVLDSDGSFFLYSKLTVDKSRWQQGNVFSCSVMHEA |
| | | LHNHYTQKSLSLSPGK |
| SEQ ID NO: 28 | HC DNA | CAGGTGCAGCTGGTGCAGTCTGGCGCCGAGGTGGTGAAAC |
| | | CTGGCGCCTCCGTGAAGATCTCCTGCAAGGCCTCCGGCTA |
| | | CACCTTCACCGACTACAACATGGACTGGGTGAAACAGGCC |
| | | CCTGGCCAGCGGCTGGAATGGATCGGCGACATCAACCCTA |
| | | AGTACGACATCTCCACCTACAACCAGCAGTTCAAGGGCAA |
| | | GGCCACCATCACCGTGGACAAGTCCGCCTCCACCGCCTAC |
| | | ATGGAACTGTCCTCCCTGCGGAGCGAGGACACCGCCGTGT |
| | | ACTACTGCGCCAGACGGGGCTTCTTCCTGTACTACGGCAT |
| | | CAACTACTACTACTTCGACGTGTGGGGCCAGGGCACCCTG |
| | | GTGACAGTGTCCTCCGCTAGCACCAAGGGCCCAAGTGTGT |
| | | TTCCCCTGGCCCCCAGCAGCAAGTCTACTTCCGGCGGAAC |
| | | TGCTGCCCTGGGTTGCCTGGTGAAGGACTACTTCCCCGAG |
| | | CCCGTGACAGTGTCCTGGAACTCTGGGGCTCTGACTTCCG |
| | | GCGTGCACACCTTCCCCGCCGTGCTGCAGAGCAGCGGCCT |
| | | GTACAGCCTGAGCAGCGTGGTGACAGTGCCCTCCAGCTCT |
| | | CTGGGAACCCAGACCTATATCTGCAACGTGAACCACAAGC |
| | | CCAGCAACACCAAGGTGGACAAGAGAGTGGAGCCCAAGAG |
| | | CTGCGACAAGACCCACACCTGCCCCCCCTGCCCAGCTCCA |
| | | GAACTGCTGGGAGGGCCTTCCGTGTTCCTGTTCCCCCCCA |
| | | AGCCCAAGGACACCCTGATGATCAGCAGGACCCCCGAGGT |
| | | GACCTGCGTGGTGGTGGACGTGTCCCACGAGGACCCAGAG |
| | | GTGAAGTTCAACTGGTACGTGGACGGCGTGGAGGTGCACA |
| | | ACGCCAAGACCAAGCCCAGAGAGGAGCAGTACAACAGCAC |
| | | CTACAGGGTGGTGTCCGTGCTGACCGTGCTGCACCAGGAC |
| | | TGGCTGAACGGCAAAGAATACAAGTGCAAAGTCTCCAACA |
| | | AGGCCCTGCCAGCCCCAATCGAAAAGACAATCAGCAAGGC |
| | | CAAGGGCCAGCCACGGGAGCCCCAGGTGTACACCCTGCCC |
| | | CCCAGCCGGGAGGAGATGACCAAGAACCAGGTGTCCCTGA |
| | | CCTGTCTGGTGAAGGGCTTCTACCCCAGCGATATCGCCGT |
| | | GGAGTGGGAGAGCAACGGCCAGCCCGAGAACAACTACAAG |
| | | ACCACCCCCCCAGTGCTGGACAGCGACGGCAGCTTCTTCC |
| | | TGTACAGCAAGCTGACCGTGGACAAGTCCAGGTGGCAGCA |
| | | GGGCAACGTGTTCAGCTGCAGCGTGATGCACGAGGCCCTG |
| | | CACAACCACTACACCCAGAAGTCCCTGAGCCTGAGCCCCG |
| | | GCAAG |
| SEQ ID NO: 14 | LCDR1 (KABAT) | SASSSVSYIH |
| SEQ ID NO: 15 | LCDR2 (KABAT) | STSNLAS |
| SEQ ID NO: 16 | LCDR3 (KABAT) | HQWSSYPWT |
| SEQ ID NO: 17 | LCDR1 (CHOTHIA) | SSSVSY |
| SEQ ID NO: 18 | LCDR2 (CHOTHIA) | STS |
| SEQ ID NO: 19 | LCDR3 (CHOTHIA) | WSSYPW |
| SEQ ID NO: 14 | LCDR1 (COMBINED) | SASSSVSYIH |
| SEQ ID NO: 15 | LCDR2 (COMBINED) | STSNLAS |
| SEQ ID NO: 16 | LCDR3 (COMBINED) | HQWSSYPWT |
| SEQ ID NO: 20 | LCDR1 (IMGT) | SSVSY |
| SEQ ID NO: 18 | LCDR2 (IMGT) | STS |
| SEQ ID NO: 16 | LCDR3 (IMGT) | HQWSSYPWT |
| SEQ ID NO: 78 | VL | EIVLTQSPATLSASPGEEITLSCSASSSVSYIHWYQQKP |
| | | GQAPRLLIYSTSNLASGIPARFSGSGSGTFYTLTISSVEP |
| | | EDAAVYYCHQWSSYPWTFGGGTKLEIK |
| SEQ ID NO: 79 | VL DNA | GAGATCGTGCTGACCCAGTCCCCTGCCACCCTGTCTGCCA |
| | | GCCCTGGCGAGGAGATCACCCTGTCCTGCTCCGCCTCCTC |
| | | CTCCGTGTCCTACATCCACTGGTATCAGCAGAAGCCCGGC |
| | | CAGGCCCCTCGGCTGCTGATCTACTCCACCTCCAACCTGG |
| | | CCTCCGGCATCCCTGCCAGATTCTCCGGCTCTGGCTCCGG |
| | | CACCTTTTACACCCTGACCATCTCCAGCGTGGAACCCGAG |
| | | GACGCCGCCGTGTACTACTGCCACCAGTGGTCCAGCTACC |
| | | CCTGGACCTTCGGCGGAGGCACCAAGCTGGAAATCAAG |
| SEQ ID NO: 80 | LC | EIVLTQSPATLSASPGEEITLSCSASSSVSYIHWYQQKP |
| | | GQAPRLLIYSTSNLASGIPARFSGSGSGTFYTLTISSVEP |
| | | EDAAVYYCHQWSSYPWTFGGGTKLEIKRTVAAPSVFIFPP |
| | | SDEQLKSGTASVVCLLNNFYPREAKVQWKVDNALQSGNSQ |
| | | ESVTEQDSKDSTYSLSSTLTLSKADYEKHKVYACEVTHQG |
| | | LSSPVTKSFNRGEC |
| SEQ ID NO: 81 | LC DNA | GAGATCGTGCTGACCCAGTCCCCTGCCACCCTGTCTGCCA |
| | | GCCCTGGCGAGGAGATCACCCTGTCCTGCTCCGCCTCCTC |
| | | CTCCGTGTCCTACATCCACTGGTATCAGCAGAAGCCCGGC |
| | | CAGGCCCCTCGGCTGCTGATCTACTCCACCTCCAACCTGG |
| | | CCTCCGGCATCCCTGCCAGATTCTCCGGCTCTGGCTCCGG |
| | | CACCTTTTACACCCTGACCATCTCCAGCGTGGAACCCGAG |
| | | GACGCCGCCGTGTACTACTGCCACCAGTGGTCCAGCTACC |
| | | CCTGGACCTTCGGCGGAGGCACCAAGCTGGAAATCAAGCG |
| | | TACGGTGGCCGCTCCCAGCGTGTTCATCTTCCCCCCCAGC |
| | | GACGAGCAGCTGAAGAGTGGCACCGCCAGCGTGGTGTGCC |
| | | TGCTGAACAACTTCTACCCCCGGGAGGCCAAGGTGCAGTG |
| | | GAAGGTGGACAACGCCCTGCAGAGCGGCAACAGCCAGGAG |
| | | AGCGTCACCGAGCAGGACAGCAAGGACTCCACCTACAGCC |
| | | TGAGCAGCACCCTGACCCTGAGCAAGGCCGACTACGAGAA |
| | | GCATAAGGTGTACGCCTGCGAGGTGACCCACCAGGGCCTG |
| | | TCCAGCCCCGTGACCAAGAGCTTCAACAGGGGCGAGTGC |
| ANTI-HUMAN | | |
| ENTPD2 MAB8 | | |
| SEQ ID NO: 82 | HCDR1 (KABAT) | SSSAAWN |
| SEQ ID NO: 83 | HCDR2 (KABAT) | RIYYRSKWYNDYAVSVKS |
| SEQ ID NO: 84 | HCDR3 (KABAT) | GSYVTSSYEGFDY |
| SEQ ID NO: 85 | HCDR1 (CHOTHIA) | GDSVSSSSA |
| SEQ ID NO: 86 | HCDR2 (CHOTHIA) | YYRSKWY |
| SEQ ID NO: 84 | HCDR3 (CHOTHIA) | GSYVTSSYEGFDY |
| SEQ ID NO: 87 | HCDR1 (COMBINED) | GDSVSSSSAAWN |
| SEQ ID NO: 83 | HCDR2 (COMBINED) | RIYYRSKWYNDYAVSVKS |
| SEQ ID NO: 84 | HCDR3 (COMBINED) | GSYVTSSYEGFDY |
| SEQ ID NO: 88 | HCDR1 (IMGT) | GDSVSSSSAA |
| SEQ ID NO: 89 | HCDR2 (IMGT) | IYYRSKWYN |
| SEQ ID NO: 90 | HCDR3 (IMGT) | ARGSYVTSSYEGFDY |
| SEQ ID NO: 91 | VH | QVQLQQSGPGLVKPSQTLSLTCAISGDSVSSSSAAWNWIR |
| | | QSPSRGLEWLGRIYYRSKWYNDYAVSVKSRITINPDTSKN |
| | | QFSLQLNSVTPEDTAVYYCARGSYVTSSYEGFDYWGQGTL |
| | | VTVSS |
| SEQ ID NO: 92 | VH DNA | CAGGTGCAATTGCAGCAGAGCGGTCCGGGCCTGGTGAAAC |
| | | CGAGCCAGACCCTGAGCCTGACCTGCGCGATTTCCGGAGA |
| | | TAGCGTGAGCTCTAGCTCTGCTGCTTGGAACTGGATTCGT |
| | | CAGAGCCCGAGCCGTGGCCTCGAGTGGCTGGGCCGTATCT |
| | | ACTACCGTAGCAAATGGTACAACGACTATGCCGTGAGCGT |
| | | GAAAAGCCGCATTACCATTAACCCGGATACTTCGAAAAAC |
| | | CAGTTTAGCCTGCAACTGAACAGCGTGACCCCGGAAGATA |
| | | CGGCCGTGTATTATTGCGCGCGTGGTTCTTACGTTACTTC |
| | | TTCTTACGAAGGTTTCGATTACTGGGGCCAAGGCACCCTG |
| | | GTGACTGTTAGCTCA |
| SEQ ID NO: 93 | HC | QVQLQQSGPGLVKPSQTLSLTCAISGDSVSSSSAAWNWIR |
| | | QSPSRGLEWLGRIYYRSKWYNDYAVSVKSRITINPDTSKN |
| | | QFSLQLNSVTPEDTAVYYCARGSYVTSSYEGFDYWGQGTL |
| | | VTVSSASTKGPSVFPLAPSSKSTSGGTAALGCLVKDYFPE |
| | | PVTVSWNSGALTSGVHTFPAVLQSSGLYSLSSVVTVPSSS |
| | | LGTQTYICNVNHKPSNTKVDKRVEPKSCDKTHTCPPCPAP |
| | | ELLGGPSVFLFPPKPKDTLMISRTPEVTCVVVDVSHEDPE |
| | | VKFNWYVDGVEVHNAKTKPREEQYNSTYRVVSVLTVLHQD |
| | | WLNGKEYKCKVSNKALPAPIEKTISKAKGQPREPQVYTLP |
| | | PSREEMTKNQVSLTCLVKGFYPSDIAVEWESNGQPENNYK |
| | | TTPPVLDSDGSFFLYSKLTVDKSRWQQGNVFSCSVMHEAL |
| | | HNHYTQKSLSLSPGK |
| SEQ ID NO: 94 | HC DNA | CAGGTGCAATTGCAGCAGAGCGGTCCGGGCCTGGTGAAAC |
| | | CGAGCCAGACCCTGAGCCTGACCTGCGCGATTTCCGGAGA |
| | | TAGCGTGAGCTCTAGCTCTGCTGCTTGGAACTGGATTCGT |
| | | CAGAGCCCGAGCCGTGGCCTCGAGTGGCTGGGCCGTATCT |
| | | ACTACCGTAGCAAATGGTACAACGACTATGCCGTGAGCGT |
| | | GAAAAGCCGCATTACCATTAACCCGGATACTTCGAAAAAC |
| | | CAGTTTAGCCTGCAACTGAACAGCGTGACCCCGGAAGATA |
| | | CGGCCGTGTATTATTGCGCGCGTGGTTCTTACGTTACTTC |
| | | TTCTTACGAAGGTTTCGATTACTGGGGCCAAGGCACCCTG |
| | | GTGACTGTTAGCTCAGCCTCCACCAAGGGTCCATCGGTCT |
| | | TCCCCCTGGCACCCTCCTCCAAGAGCACCTCTGGGGGCAC |
| | | AGCGGCCCTGGGCTGCCTGGTCAAGGACTACTTCCCCGAA |
| | | CCGGTGACGGTGTCGTGGAACTCAGGCGCCCTGACCAGCG |
| | | GCGTGCACACCTTCCCGGCTGTCCTACAGTCCTCAGGACT |
| | | CTACTCCCTCAGCAGCGTGGTGACCGTGCCCTCCAGCAGC |
| | | TTGGGCACCCAGACCTACATCTGCAACGTGAATCACAAGC |
| | | CCAGCAACACCAAGGTGGACAAGAGAGTTGAGCCCAAATC |
| | | TTGTGACAAAACTCACACATGCCCACCGTGCCCAGCACCT |
| | | GAACTCCTGGGGGGACCGTCAGTCTTCCTCTTCCCCCCAA |
| | | AACCCAAGGACACCCTCATGATCTCCCGGACCCCTGAGGT |
| | | CACATGCGTGGTGGTGGACGTGAGCCACGAAGACCCTGAG |
| | | GTCAAGTTCAACTGGTACGTGGACGGCGTGGAGGTGCATA |
| | | ATGCCAAGACAAAGCCGCGGGAGGAGCAGTACAACAGCAC |
| | | GTACCGGGTGGTCAGCGTCCTCACCGTCCTGCACCAGGAC |
| | | TGGCTGAATGGCAAGGAGTACAAGTGCAAGGTCTCCAACA |
| | | AAGCCCTCCCAGCCCCCATCGAGAAAACCATCTCCAAAGC |
| | | CAAAGGGCAGCCCCGAGAACCACAGGTGTACACCCTGCCC |
| | | CCATCCCGGGAGGAGATGACCAAGAACCAGGTCAGCCTGA |
| | | CCTGCCTGGTCAAAGGCTTCTATCCCAGCGACATCGCCGT |
| | | GGAGTGGGAGAGCAATGGGCAGCCGGAGAACAACTACAAG |
| | | ACCACGCCTCCCGTGCTGGACTCCGACGGCTCCTTCTTCC |
| | | TCTACAGCAAGCTCACCGTGGACAAGAGCAGGTGGCAGCA |
| | | GGGGAACGTCTTCTCATGCTCCGTGATGCATGAGGCTCTG |
| | | CACAACCACTACACGCAGAAGAGCCTCTCCCTGTCTCCGG |
| | | GTAAA |
| SEQ ID NO: 95 | LCDR1 (KABAT) | SGDNLPEKYAY |
| SEQ ID NO: 96 | LCDR2 (KABAT) | DDNKRPS |
| SEQ ID NO: 97 | LCDR3 (KABAT) | QSYGKWGWTWV |
| SEQ ID NO: 98 | LCDR1 (CHOTHIA) | DNLPEKY |
| SEQ ID NO: 99 | LCDR2 (CHOTHIA) | DDN |
| SEQ ID NO: 100 | LCDR3 (CHOTHIA) | YGKWGWTW |
| SEQ ID NO: 95 | LCDR1 (COMBINED) | SGDNLPEKYAY |
| SEQ ID NO: 96 | LCDR2 (COMBINED) | DDNKRPS |
| SEQ ID NO: 97 | LCDR3 (COMBINED) | QSYGKWGWTWV |
| SEQ ID NO: 101 | LCDR1 (IMGT) | NLPEKY |
| SEQ ID NO: 99 | LCDR2 (IMGT) | DDN |
| SEQ ID NO: 97 | LCDR3 (IMGT) | QSYGKWGWTWV |
| SEQ ID NO: 102 | VL | SYELTQPLSVSVALGQTARITCSGDNLPEKYAYVVYQQKP |
| | | GQAPVLVIYDDNKRPSGIPERFSGSNSGNTATLTISRAQA |
| | | GDEADYYCQSYGKWGWTWVFGGGTKLTVL |
| SEQ ID NO: 103 | VL DNA | AGCTACGAACTGACCCAGCCGCTGTCCGTGAGCGTGGCTC |
| | | TGGGCCAGACCGCGCGGATTACCTGTAGCGGCGATAACCT |
| | | GCCGGAAAAATACGCTTACTGGTACCAGCAGAAACCGGGC |
| | | CAGGCGCCGGTGCTGGTGATCTACGACGACAACAAACGTC |
| | | CGAGCGGCATCCCGGAACGTTTTAGCGGATCCAACAGCGG |
| | | CAACACCGCGACCCTGACCATTAGCCGCGCCCAGGCGGGA |
| | | GACGAAGCGGATTATTACTGCCAGTCTTACGGTAAATGGG |
| | | GTTGGACTTGGGTGTTTGGCGGCGGCACGAAGTTAACCGT |
| | | CCTA |
| SEQ ID NO: 104 | LC | SYELTQPLSVSVALGQTARITCSGDNLPEKYAYVVYQQKP |
| | | GQAPVLVIYDDNKRPSGIPERFSGSNSGNTATLTISRAQA |
| | | GDEADYYCQSYGKWGWTWVFGGGTKLTVLGQPKAAPSVTL |
| | | FPPSSEELQANKATLVCLISDFYPGAVTVAWKADSSPVKA |
| | | GVETTTPSKQSNNKYAASSYLSLTPEQWKSHRSYSCQVTH |
| | | EGSTVEKTVAPTECS |
| SEQ ID NO: 105 | LC DNA | AGCTACGAACTGACCCAGCCGCTGTCCGTGAGCGTGGCTC |
| | | TGGGCCAGACCGCGCGGATTACCTGTAGCGGCGATAACCT |
| | | GCCGGAAAAATACGCTTACTGGTACCAGCAGAAACCGGGC |
| | | CAGGCGCCGGTGCTGGTGATCTACGACGACAACAAACGTC |
| | | CGAGCGGCATCCCGGAACGTTTTAGCGGATCCAACAGCGG |
| | | CAACACCGCGACCCTGACCATTAGCCGCGCCCAGGCGGGA |
| | | GACGAAGCGGATTATTACTGCCAGTCTTACGGTAAATGGG |
| | | GTTGGACTTGGGTGTTTGGCGGCGGCACGAAGTTAACCGT |
| | | CCTAGGTCAGCCCAAGGCTGCCCCCTCGGTCACTCTGTTC |
| | | CCGCCCTCCTCTGAGGAGCTTCAAGCCAACAAGGCCACAC |
| | | TGGTGTGTCTCATAAGTGACTTCTACCCGGGAGCCGTGAC |
| | | AGTGGCCTGGAAGGCAGATAGCAGCCCCGTCAAGGCGGGA |
| | | GTGGAGACCACCACACCCTCCAAACAAAGCAACAACAAGT |
| | | ACGCGGCCAGCAGCTATCTGAGCCTGACGCCTGAGCAGTG |
| | | GAAGTCCCACAGAAGCTACAGCTGCCAGGTCACGCATGAA |
| | | GGGAGCACCGTGGAGAAGACAGTGGCCCCTACAGAATGTT |
| | | CA |
| ANTI-HUMAN | | |
| ENTPD2 MAB9 | | |
| SEQ ID NO: 106 | HCDR1 (KABAT) | SYAVS |
| SEQ ID NO: 107 | HCDR2 (KABAT) | RIVPWLGHTQYAQKFQG |
| SEQ ID NO: 108 | HCDR3 (KABAT) | ESPGYRYSFDV |
| SEQ ID NO: 109 | HCDR1 (CHOTHIA) | GGTFDSY |
| SEQ ID NO: 110 | HCDR2 (CHOTHIA) | VPWLGH |
| SEQ ID NO: 108 | HCDR3 (CHOTHIA) | ESPGYRYSFDV |
| SEQ ID NO: 111 | HCDR1 (COMBINED) | GGTFDSYAVS |
| SEQ ID NO: 107 | HCDR2 (COMBINED) | RIVPWLGHTQYAQKFQG |
| SEQ ID NO: 108 | HCDR3 (COMBINED) | ESPGYRYSFDV |
| SEQ ID NO: 112 | HCDR1 (IMGT) | GGTFDSYA |
| SEQ ID NO: 113 | HCDR2 (IMGT) | IVPWLGHT |
| SEQ ID NO: 114 | HCDR3 (IMGT) | ARESPGYRYSFDV |
| SEQ ID NO: 115 | VH | QVQLVQSGAEVKKPGSSVKVSCKASGGTFDSYAVSWVRQA |
| | | PGQGLEWMGRIVPWLGHTQYAQKFQGRVTITADESTSTAY |
| | | MELSSLRSEDTAVYYCARESPGYRYSFDVWDQGTLVTVSS |
| SEQ ID NO: 116 | VH DNA | CAGGTGCAATTGGTGCAGAGCGGTGCCGAAGTGAAAAAAC |
| | | CGGGCAGCAGCGTGAAAGTTAGCTGCAAAGCATCCGGAGG |
| | | GACGTTTGACTCTTACGCTGTTTCTTGGGTGCGCCAGGCC |
| | | CCGGGCCAGGGCCTCGAGTGGATGGGCCGTATCGTTCCGT |
| | | GGCTGGGCCATACTCAGTACGCCCAGAAATTTCAGGGCCG |
| | | GGTGACCATTACCGCCGATGAAAGCACCAGCACCGCCTAT |
| | | ATGGAACTGAGCAGCCTGCGCAGCGAAGATACGGCCGTGT |
| | | ATTATTGCGCGCGTGAATCTCCGGGTTACCGTTACTCTTT |
| | | CGATGTTTGGGACCAAGGCACCCTGGTGACTGTTAGCTCA |
| SEQ ID NO: 117 | HC | QVQLVQSGAEVKKPGSSVKVSCKASGGTFDSYAVSWVRQA |
| | | PGQGLEWMGRIVPWLGHTQYAQKFQGRVTITADESTSTAY |
| | | MELSSLRSEDTAVYYCARESPGYRYSFDVWDQGTLVTVSS |
| | | ASTKGPSVFPLAPSSKSTSGGTAALGCLVKDYFPEPVTVS |
| | | WNSGALTSGVHTFPAVLQSSGLYSLSSVVTVPSSSLGTQT |
| | | YICNVNHKPSNTKVDKRVEPKSCDKTHTCPPCPAPELLGG |
| | | PSVFLEPPKPKDTLMISRTPEVTCVVVDVSHEDPEVKFNV |
| | | VYVDGVEVHNAKTKPREEQYNSTYRVVSVLTVLHQDWLNG |
| | | KEYKCKVSNKALPAPIEKTISKAKGQPREPQVYTLPPSRE |
| | | EMTKNQVSLTCLVKGFYPSDIAVEWESNGQPENNYKTTPP |
| | | VLDSDGSFFLYSKLTVDKSRWQQGNVFSCSVMHEALHNHY |
| | | TQKSLSLSPGK |
| SEQ ID NO: 118 | HC DNA | CAGGTGCAATTGGTGCAGAGCGGTGCCGAAGTGAAAAAAC |
| | | CGGGCAGCAGCGTGAAAGTTAGCTGCAAAGCATCCGGAGG |
| | | GACGTTTGACTCTTACGCTGTTTCTTGGGTGCGCCAGGCC |
| | | CCGGGCCAGGGCCTCGAGTGGATGGGCCGTATCGTTCCGT |
| | | GGCTGGGCCATACTCAGTACGCCCAGAAATTTCAGGGCCG |
| | | GGTGACCATTACCGCCGATGAAAGCACCAGCACCGCCTAT |
| | | ATGGAACTGAGCAGCCTGCGCAGCGAAGATACGGCCGTGT |
| | | ATTATTGCGCGCGTGAATCTCCGGGTTACCGTTACTCTTT |
| | | CGATGTTTGGGACCAAGGCACCCTGGTGACTGTTAGCTCA |
| | | GCCTCCACCAAGGGTCCATCGGTCTTCCCCCTGGCACCCT |
| | | CCTCCAAGAGCACCTCTGGGGGCACAGCGGCCCTGGGCTG |
| | | CCTGGTCAAGGACTACTTCCCCGAACCGGTGACGGTGTCG |
| | | TGGAACTCAGGCGCCCTGACCAGCGGCGTGCACACCTTCC |
| | | CGGCTGTCCTACAGTCCTCAGGACTCTACTCCCTCAGCAG |
| | | CGTGGTGACCGTGCCCTCCAGCAGCTTGGGCACCCAGACC |
| | | TACATCTGCAACGTGAATCACAAGCCCAGCAACACCAAGG |
| | | TGGACAAGAGAGTTGAGCCCAAATCTTGTGACAAAACTCA |
| | | CACATGCCCACCGTGCCCAGCACCTGAACTCCTGGGGGGA |
| | | CCGTCAGTCTTCCTCTTCCCCCCAAAACCCAAGGACACCC |
| | | TCATGATCTCCCGGACCCCTGAGGTCACATGCGTGGTGGT |
| | | GGACGTGAGCCACGAAGACCCTGAGGTCAAGTTCAACTGG |
| | | TACGTGGACGGCGTGGAGGTGCATAATGCCAAGACAAAGC |
| | | CGCGGGAGGAGCAGTACAACAGCACGTACCGGGTGGTCAG |
| | | CGTCCTCACCGTCCTGCACCAGGACTGGCTGAATGGCAAG |
| | | GAGTACAAGTGCAAGGTCTCCAACAAAGCCCTCCCAGCCC |
| | | CCATCGAGAAAACCATCTCCAAAGCCAAAGGGCAGCCCCG |
| | | AGAACCACAGGTGTACACCCTGCCCCCATCCCGGGAGGAG |
| | | ATGACCAAGAACCAGGTCAGCCTGACCTGCCTGGTCAAAG |
| | | GCTTCTATCCCAGCGACATCGCCGTGGAGTGGGAGAGCAA |
| | | TGGGCAGCCGGAGAACAACTACAAGACCACGCCTCCCGTG |
| | | CTGGACTCCGACGGCTCCTTCTTCCTCTACAGCAAGCTCA |
| | | CCGTGGACAAGAGCAGGTGGCAGCAGGGGAACGTCTTCTC |
| | | ATGCTCCGTGATGCATGAGGCTCTGCACAACCACTACACG |
| | | CAGAAGAGCCTCTCCCTGTCTCCGGGTAAA |
| SEQ ID NO: 119 | LCDR1 (KABAT) | SGDAIGEKYVY |
| SEQ ID NO: 120 | LCDR2 (KABAT) | DDNNRPS |
| SEQ ID NO: 121 | LCDR3 (KABAT) | ASYDLQQARWV |
| SEQ ID NO: 122 | LCDR1 (CHOTHIA) | DAIGEKY |
| SEQ ID NO: 99 | LCDR2 (CHOTHIA) | DDN |
| SEQ ID NO: 123 | LCDR3 (CHOTHIA) | YDLQQARW |
| SEQ ID NO: 119 | LCDR1 (COMBINED) | SGDAIGEKYVY |
| SEQ ID NO: 120 | LCDR2 (COMBINED) | DDNNRPS |
| SEQ ID NO: 121 | LCDR3 (COMBINED) | ASYDLQQARWV |
| SEQ ID NO: 124 | LCDR1 (IMGT) | AIGEKY |
| SEQ ID NO: 99 | LCDR2 (IMGT) | DDN |
| SEQ ID NO: 121 | LCDR3 (IMGT) | ASYDLQQARWV |
| SEQ ID NO: 125 | VL | SYELTQPLSVSVALGQTARITCSGDAIGEKYVYWYQQKPG |
| | | QAPVLVIYDDNNRPSGIPERFSGSNSGNTATLTISRAQAG |
| | | DEADYYCASYDLQQARWVFGGGTKLTVL |
| SEQ ID NO: 126 | VL DNA | AGCTACGAACTGACCCAGCCGCTGTCCGTGAGCGTGGCTC |
| | | TGGGCCAGACCGCGCGGATTACCTGTAGCGGCGATGCTAT |
| | | CGGTGAAAAATACGTTTACTGGTACCAGCAGAAACCGGGC |
| | | CAGGCGCCGGTGCTGGTGATCTACGACGACAACAACCGTC |
| | | CGAGCGGCATCCCGGAACGTTTTAGCGGATCCAACAGCGG |
| | | CAACACCGCGACCCTGACCATTAGCCGCGCCCAGGCGGGA |
| | | GACGAAGCGGATTATTACTGCGCTTCTTACGACCTGCAGC |
| | | AGGCTCGTTGGGTGTTTGGCGGCGGCACGAAGTTAACCGT |
| | | CCTA |
| SEQ ID NO: 127 | LC | SYELTQPLSVSVALGQTARITCSGDAIGEKYVYWYQQKPG |
| | | QAPVLVIYDDNNRPSGIPERFSGSNSGNTATLTISRAQAG |
| | | DEADYYCASYDLQQARWVFGGGTKLTVLGQPKAAPSVTLF |
| | | PPSSEELQANKATLVCLISDFYPGAVTVAWKADSSPVKAG |
| | | VETTTPSKQSNNKYAASSYLSLTPEQWKSHRSYSCQVTHE |
| | | GSTVEKTVAPTECS |
| SEQ ID NO: 128 | LC DNA | AGCTACGAACTGACCCAGCCGCTGTCCGTGAGCGTGGCTC |
| | | TGGGCCAGACCGCGCGGATTACCTGTAGCGGCGATGCTAT |
| | | CGGTGAAAAATACGTTTACTGGTACCAGCAGAAACCGGGC |
| | | CAGGCGCCGGTGCTGGTGATCTACGACGACAACAACCGTC |
| | | CGAGCGGCATCCCGGAACGTTTTAGCGGATCCAACAGCGG |
| | | CAACACCGCGACCCTGACCATTAGCCGCGCCCAGGCGGGA |
| | | GACGAAGCGGATTATTACTGCGCTTCTTACGACCTGCAGC |
| | | AGGCTCGTTGGGTGTTTGGCGGCGGCACGAAGTTAACCGT |
| | | CCTAGGTCAGCCCAAGGCTGCCCCCTCGGTCACTCTGTTC |
| | | CCGCCCTCCTCTGAGGAGCTTCAAGCCAACAAGGCCACAC |
| | | TGGTGTGTCTCATAAGTGACTTCTACCCGGGAGCCGTGAC |
| | | AGTGGCCTGGAAGGCAGATAGCAGCCCCGTCAAGGCGGGA |
| | | GTGGAGACCACCACACCCTCCAAACAAAGCAACAACAAGT |
| | | ACGCGGCCAGCAGCTATCTGAGCCTGACGCCTGAGCAGTG |
| | | GAAGTCCCACAGAAGCTACAGCTGCCAGGTCACGCATGAA |
| | | GGGAGCACCGTGGAGAAGACAGTGGCCCCTACAGAATGTT |
| | | CA |
| ANTI-HUMAN | | |
| ENTPD2 MAB10 | | |
| SEQ ID NO: 106 | HCDR1 (KABAT) | SYAVS |
| SEQ ID NO: 129 | HCDR2 (KABAT) | RIVPWLGFTRYAQKFQG |
| SEQ ID NO: 108 | HCDR3 (KABAT) | ESPGYRYSFDV |
| SEQ ID NO: 109 | HCDR1 (CHOTHIA) | GGTFDSY |
| SEQ ID NO: 130 | HCDR2 (CHOTHIA) | VPWLGF |
| SEQ ID NO: 108 | HCDR3 (CHOTHIA) | ESPGYRYSFDV |
| SEQ ID NO: 111 | HCDR1 (COMBINED) | GGTFDSYAVS |
| SEQ ID NO: 129 | HCDR2 (COMBINED) | RIVPWLGFTRYAQKFQG |
| SEQ ID NO: 108 | HCDR3 (COMBINED) | ESPGYRYSFDV |
| SEQ ID NO: 112 | HCDR1 (IMGT) | GGTFDSYA |
| SEQ ID NO: 131 | HCDR2 (IMGT) | IVPWLGFT |
| SEQ ID NO: 114 | HCDR3 (IMGT) | ARESPGYRYSFDV |
| SEQ ID NO: 132 | VH | QVQLVQSGAEVKKPGSSVKVSCKASGGTFDSYAVSWVRQA |
| | | PGQGLEWMGRIVPWLGFTRYAQKFQGRVTITADESTSTAY |
| | | MELSSLRSEDTAVYYCARESPGYRYSF |
| | | DVWDQGTLVTVSS |
| SEQ ID NO: 133 | VH DNA | CAGGTGCAATTGGTGCAGAGCGGTGCCGAAGTGAAAAAAC |
| | | CGGGCAGCAGCGTGAAAGTTAGCTGCAAAGCATCCGGAGG |
| | | GACGTTTGACTCTTACGCTGTTTCTTGGGTGCGCCAGGCC |
| | | CCGGGCCAGGGCCTCGAGTGGATGGGCCGTATCGTTCCGT |
| | | GGCTGGGCTTCACTCGTTACGCCCAGAAATTTCAGGGCCG |
| | | GGTGACCATTACCGCCGATGAAAGCACCAGCACCGCCTAT |
| | | ATGGAACTGAGCAGCCTGCGCAGCGAAGATACGGCCGTGT |
| | | ATTATTGCGCGCGTGAATCTCCGGGTTACCGTTACTCTTT |
| | | CGATGTTTGGGACCAAGGCACCCTGGTGACTGTTAGCTCA |
| SEQ ID NO: 134 | HC | QVQLVQSGAEVKKPGSSVKVSCKASGGTFDSYAVSWVRQA |
| | | PGQGLEWMGRIVPWLGFTRYAQKFQGRVTITADESTSTAY |
| | | MELSSLRSEDTAVYYCARESPGYRYSFDVWDQGTLVTVSS |
| | | ASTKGPSVFPLAPSSKSTSGGTAALGCLVKDYFPEPVTVS |
| | | WNSGALTSGVHTFPAVLQSSGLYSLSSVVTVPSSSLGTQT |
| | | YICNVNHKPSNTKVDKRVEPKSCDKTHTCPPCPAPELLGG |
| | | PSVFLEPPKPKDTLMISRTPEVTCVVVDVSHEDPEVKFNV |
| | | VYVDGVEVHNAKTKPREEQYNSTYRVVSVLTVLHQDWLNG |
| | | KEYKCKVSNKALPAPIEKTISKAKGQPREPQVYTLPPSRE |
| | | EMTKNQVSLTCLVKGFYPSDIAVEWESNGQPENNYKTTPP |
| | | VLDSDGSFFLYSKLTVDKSRWQQGNVFSCSVMHEALHNHY |
| | | TQKSLSLSPGK |
| SEQ ID NO: 135 | HC DNA | CAGGTGCAATTGGTGCAGAGCGGTGCCGAAGTGAAAAAAC |
| | | CGGGCAGCAGCGTGAAAGTTAGCTGCAAAGCATCCGGAGG |
| | | GACGTTTGACTCTTACGCTGTTTCTTGGGTGCGCCAGGCC |
| | | CCGGGCCAGGGCCTCGAGTGGATGGGCCGTATCGTTCCGT |
| | | GGCTGGGCTTCACTCGTTACGCCCAGAAATTTCAGGGCCG |
| | | GGTGACCATTACCGCCGATGAAAGCACCAGCACCGCCTAT |
| | | ATGGAACTGAGCAGCCTGCGCAGCGAAGATACGGCCGTGT |
| | | ATTATTGCGCGCGTGAATCTCCGGGTTACCGTTACTCTTT |
| | | CGATGTTTGGGACCAAGGCACCCTGGTGACTGTTAGCTCA |
| | | GCCTCCACCAAGGGTCCATCGGTCTTCCCCCTGGCACCCT |
| | | CCTCCAAGAGCACCTCTGGGGGCACAGCGGCCCTGGGCTG |
| | | CCTGGTCAAGGACTACTTCCCCGAACCGGTGACGGTGTCG |
| | | TGGAACTCAGGCGCCCTGACCAGCGGCGTGCACACCTTCC |
| | | CGGCTGTCCTACAGTCCTCAGGACTCTACTCCCTCAGCAG |
| | | CGTGGTGACCGTGCCCTCCAGCAGCTTGGGCACCCAGACC |
| | | TACATCTGCAACGTGAATCACAAGCCCAGCAACACCAAGG |
| | | TGGACAAGAGAGTTGAGCCCAAATCTTGTGACAAAACTCA |
| | | CACATGCCCACCGTGCCCAGCACCTGAACTCCTGGGGGGA |
| | | CCGTCAGTCTTCCTCTTCCCCCCAAAACCCAAGGACACCC |
| | | TCATGATCTCCCGGACCCCTGAGGTCACATGCGTGGTGGT |
| | | GGACGTGAGCCACGAAGACCCTGAGGTCAAGTTCAACTGG |
| | | TACGTGGACGGCGTGGAGGTGCATAATGCCAAGACAAAGC |
| | | CGCGGGAGGAGCAGTACAACAGCACGTACCGGGTGGTCAG |
| | | CGTCCTCACCGTCCTGCACCAGGACTGGCTGAATGGCAAG |
| | | GAGTACAAGTGCAAGGTCTCCAACAAAGCCCTCCCAGCCC |
| | | CCATCGAGAAAACCATCTCCAAAGCCAAAGGGCAGCCCCG |
| | | AGAACCACAGGTGTACACCCTGCCCCCATCCCGGGAGGAG |
| | | ATGACCAAGAACCAGGTCAGCCTGACCTGCCTGGTCAAAG |
| | | GCTTCTATCCCAGCGACATCGCCGTGGAGTGGGAGAGCAA |
| | | TGGGCAGCCGGAGAACAACTACAAGACCACGCCTCCCGTG |
| | | CTGGACTCCGACGGCTCCTTCTTCCTCTACAGCAAGCTCA |
| | | CCGTGGACAAGAGCAGGTGGCAGCAGGGGAACGTCTTCTC |
| | | ATGCTCCGTGATGCATGAGGCTCTGCACAACCACTACACG |
| | | CAGAAGAGCCTCTCCCTGTCTCCGGGTAAA |
| SEQ ID NO: 119 | LCDR1 (KABAT) | SGDAIGEKYVY |
| SEQ ID NO: 120 | LCDR2 (KABAT) | DDNNRPS |
| SEQ ID NO: 121 | LCDR3 (KABAT) | ASYDLQQARWV |
| SEQ ID NO: 122 | LCDR1 (CHOTHIA) | DAIGEKY |
| SEQ ID NO: 99 | LCDR2 (CHOTHIA) | DDN |
| SEQ ID NO: 123 | LCDR3 (CHOTHIA) | YDLQQARW |
| SEQ ID NO: 119 | LCDR1(COMBINED) | SGDAIGEKYVY |
| SEQ ID NO: 120 | LCDR2 (COMBINED) | DDNNRPS |
| SEQ ID NO: 121 | LCDR3 (COMBINED) | ASYDLQQARWV |
| SEQ ID NO: 124 | LCDR1 (IMGT) | AIGEKY |
| SEQ ID NO: 99 | LCDR2 (IMGT) | DDN |
| SEQ ID NO: 121 | LCDR3 (IMGT) | ASYDLQQARWV |
| SEQ ID NO: 125 | VL | SYELTQPLSVSVALGQTARITCSGDAIGEKYVYWYQQKPG |
| | | QAPVLVIYDDNNRPSGIPERFSGSNSGNTATLTISRAQAG |
| | | DEADYYCASYDLQQARWVFGGGTKLTVL |
| SEQ ID NO: 126 | VL DNA | AGCTACGAACTGACCCAGCCGCTGTCCGTGAGCGTGGCTC |
| | | TGGGCCAGACCGCGCGGATTACCTGTAGCGGCGATGCTAT |
| | | CGGTGAAAAATACGTTTACTGGTACCAGCAGAAACCGGGC |
| | | CAGGCGCCGGTGCTGGTGATCTACGACGACAACAACCGTC |
| | | CGAGCGGCATCCCGGAACGTTTTAGCGGATCCAACAGCGG |
| | | CAACACCGCGACCCTGACCATTAGCCGCGCCCAGGCGGGA |
| | | GACGAAGCGGATTATTACTGCGCTTCTTACGACCTGCAGC |
| | | AGGCTCGTTGGGTGTTTGGCGGCGGCACGAAGTTAACCGT |
| | | CCTA |
| SEQ ID NO: 127 | LC | SYELTQPLSVSVALGQTARITCSGDAIGEKYVYWYQQKPG |
| | | QAPVLVIYDDNNRPSGIPERFSGSNSGNTATLTISRAQAG |
| | | DEADYYCASYDLQQARWVFGGGTKLTVLGQPKAAPSVTLF |
| | | PPSSEELQANKATLVCLISDFYPGAVTVAWKADSSPVKAG |
| | | VETTTPSKQSNNKYAASSYLSLTPEQWKSHRSYSCQVTHE |
| | | GSTVEKTVAPTECS |
| SEQ ID NO: 128 | LC DNA | AGCTACGAACTGACCCAGCCGCTGTCCGTGAGCGTGGCTC |
| | | TGGGCCAGACCGCGCGGATTACCTGTAGCGGCGATGCTAT |
| | | CGGTGAAAAATACGTTTACTGGTACCAGCAGAAACCGGGC |
| | | CAGGCGCCGGTGCTGGTGATCTACGACGACAACAACCGTC |
| | | CGAGCGGCATCCCGGAACGTTTTAGCGGATCCAACAGCGG |
| | | CAACACCGCGACCCTGACCATTAGCCGCGCCCAGGCGGGA |
| | | GACGAAGCGGATTATTACTGCGCTTCTTACGACCTGCAGC |
| | | AGGCTCGTTGGGTGTTTGGCGGCGGCACGAAGTTAACCGT |
| | | CCTAGGTCAGCCCAAGGCTGCCCCCTCGGTCACTCTGTTC |
| | | CCGCCCTCCTCTGAGGAGCTTCAAGCCAACAAGGCCACAC |
| | | TGGTGTGTCTCATAAGTGACTTCTACCCGGGAGCCGTGAC |
| | | AGTGGCCTGGAAGGCAGATAGCAGCCCCGTCAAGGCGGGA |
| | | GTGGAGACCACCACACCCTCCAAACAAAGCAACAACAAGT |
| | | ACGCGGCCAGCAGCTATCTGAGCCTGACGCCTGAGCAGTG |
| | | GAAGTCCCACAGAAGCTACAGCTGCCAGGTCACGCATGAA |
| | | GGGAGCACCGTGGAGAAGACAGTGGCCCCTACAGAATGTT |
| | | CA |
| ANTI-HUMAN | | |
| ENTPD2 MAB11 | | |
| SEQ ID NO: 136 | HCDR1 (KABAT) | SYAMS |
| SEQ ID NO: 137 | HCDR2 (KABAT) | VISGSGGSTYYADSVKG |
| SEQ ID NO: 138 | HCDR3 (KABAT) | GDDYGDDYYYYGMDV |
| SEQ ID NO: 139 | HCDR1 (CHOTHIA) | GFTFSSY |
| SEQ ID NO: 140 | HCDR2 (CHOTHIA) | SGSGGS |
| SEQ ID NO: 138 | HCDR3 (CHOTHIA) | GDDYGDDYYYYGMDV |
| SEQ ID NO: 141 | HCDR1 (COMBINED) | GFTFSSYAMS |
| SEQ ID NO: 137 | HCDR2 (COMBINED) | VISGSGGSTYYADSVKG |
| SEQ ID NO: 138 | HCDR3 (COMBINED) | GDDYGDDYYYYGMDV |
| SEQ ID NO: 142 | HCDR1 (IMGT) | GFTFSSYA |
| SEQ ID NO: 143 | HCDR2 (IMGT) | ISGSGGST |
| SEQ ID NO: 144 | HCDR3 (IMGT) | ARGDDYGDDYYYYGMDV |
| SEQ ID NO: 145 | VH | EVQLLESGGGLVQSGGSLRLSCAASGFTFSSYAMSWVRQA |
| | | PGKGLEWVSVISGSGGSTYYADSVKGRFTISRDNSKNTLY |
| | | LQMNSLRAEDTAVYYCARGDDYGDDYYYYGMDVWGQGTTV |
| | | TVSS |
| SEQ ID NO: 146 | VH DNA | GAGGTGCAGCTGTTGGAGTCTGGGGGAGGCTTGGTACAGT |
| | | CTGGGGGGTCCCTGAGACTCTCCTGTGCAGCCTCTGGATT |
| | | CACCTTTAGCAGCTATGCCATGAGCTGGGTCCGCCAGGCT |
| | | CCAGGGAAGGGGCTGGAGTGGGTCTCAGTTATTAGTGGTA |
| | | GTGGTGGTAGCACATACTACGCAGACTCCGTGAAGGGCCG |
| | | GTTCACCATCTCCAGAGACAATTCCAAGAACACGCTGTAT |
| | | CTGCAAATGAACAGCCTGAGAGCCGAGGACACGGCCGTAT |
| | | ATTACTGTGCGAGAGGGGATGACTACGGTGACGACTACTA |
| | | CTACTACGGTATGGACGTCTGGGGCCAAGGGACCACGGTC |
| | | ACCGTCTCCTCA |
| SEQ ID NO: 147 | HC | EVQLLESGGGLVQSGGSLRLSCAASGFTFSSYAMSWVRQA |
| | | PGKGLEWVSVISGSGGSTYYADSVKGRFTISRDNSKNTLY |
| | | LQMNSLRAEDTAVYYCARGDDYGDDYYYYGMDVWGQGTTV |
| | | TVSSASTKGPSVFPLAPSSKSTSGGTAALGCLVKDYFPEP |
| | | VTVSWNSGALTSGVHTFPAVLQSSGLYSLSSVVTVPSSSL |
| | | GTQTYICNVNHKPSNTKVDKRVEPKSCDKTHTCPPCPAPE |
| | | LLGGPSVFLFPPKPKDTLMISRTPEVTCVVVDVSHEDPEV |
| | | KFNWYVDGVEVHNAKTKPREEQYNSTYRVVSVLTVLHQDW |
| | | LNGKEYKCKVSNKALPAPIEKTISKAKGQPREPQVYTLPP |
| | | SREEMTKNQVSLTCLVKGFYPSDIAVEWESNGQPENNYKT |
| | | TPPVLDSDGSFFLYSKLTVDKSRWQQGNVFSCSVMHEALH |
| | | NHYTQKSLSLSPGK |
| SEQ ID NO: 148 | HC DNA | GAGGTGCAGCTGTTGGAGTCTGGGGGAGGCTTGGTACAGT |
| | | CTGGGGGGTCCCTGAGACTCTCCTGTGCAGCCTCTGGATT |
| | | CACCTTTAGCAGCTATGCCATGAGCTGGGTCCGCCAGGCT |
| | | CCAGGGAAGGGGCTGGAGTGGGTCTCAGTTATTAGTGGTA |
| | | GTGGTGGTAGCACATACTACGCAGACTCCGTGAAGGGCCG |
| | | GTTCACCATCTCCAGAGACAATTCCAAGAACACGCTGTAT |
| | | CTGCAAATGAACAGCCTGAGAGCCGAGGACACGGCCGTAT |
| | | ATTACTGTGCGAGAGGGGATGACTACGGTGACGACTACTA |
| | | CTACTACGGTATGGACGTCTGGGGCCAAGGGACCACGGTC |
| | | ACCGTCTCCTCAGCTAGCACCAAGGGCCCAAGTGTGTTTC |
| | | CCCTGGCCCCCAGCAGCAAGTCTACTTCCGGCGGAACTGC |
| | | TGCCCTGGGTTGCCTGGTGAAGGACTACTTCCCCGAGCCC |
| | | GTGACAGTGTCCTGGAACTCTGGGGCTCTGACTTCCGGCG |
| | | TGCACACCTTCCCCGCCGTGCTGCAGAGCAGCGGCCTGTA |
| | | CAGCCTGAGCAGCGTGGTGACAGTGCCCTCCAGCTCTCTG |
| | | GGAACCCAGACCTATATCTGCAACGTGAACCACAAGCCCA |
| | | GCAACACCAAGGTGGACAAGAGAGTGGAGCCCAAGAGCTG |
| | | CGACAAGACCCACACCTGCCCCCCCTGCCCAGCTCCAGAA |
| | | CTGCTGGGAGGGCCTTCCGTGTTCCTGTTCCCCCCCAAGC |
| | | CCAAGGACACCCTGATGATCAGCAGGACCCCCGAGGTGAC |
| | | CTGCGTGGTGGTGGACGTGTCCCACGAGGACCCAGAGGTG |
| | | AAGTTCAACTGGTACGTGGACGGCGTGGAGGTGCACAACG |
| | | CCAAGACCAAGCCCAGAGAGGAGCAGTACAACAGCACCTA |
| | | CAGGGTGGTGTCCGTGCTGACCGTGCTGCACCAGGACTGG |
| | | CTGAACGGCAAAGAATACAAGTGCAAAGTCTCCAACAAGG |
| | | CCCTGCCAGCCCCAATCGAAAAGACAATCAGCAAGGCCAA |
| | | GGGCCAGCCACGGGAGCCCCAGGTGTACACCCTGCCCCCC |
| | | AGCCGGGAGGAGATGACCAAGAACCAGGTGTCCCTGACCT |
| | | GTCTGGTGAAGGGCTTCTACCCCAGCGATATCGCCGTGGA |
| | | GTGGGAGAGCAACGGCCAGCCCGAGAACAACTACAAGACC |
| | | ACCCCCCCAGTGCTGGACAGCGACGGCAGCTTCTTCCTGT |
| | | ACAGCAAGCTGACCGTGGACAAGTCCAGGTGGCAGCAGGG |
| | | CAACGTGTTCAGCTGCAGCGTGATGCACGAGGCCCTGCAC |
| | | AACCACTACACCCAGAAGTCCCTGAGCCTGAGCCCCGGCA |
| SEQ ID NO: 149 | LCDR1 (KABAT) | RSSQSLLHGNRYNYLD |
| SEQ ID NO: 150 | LCDR2 (KABAT) | LGSNRAS |
| SEQ ID NO: 151 | LCDR3 (KABAT) | MQALQTPPT |
| SEQ ID NO: 152 | LCDR1 (CHOTHIA) | SQSLLHGNRYNY |
| SEQ ID NO: 153 | LCDR2 (CHOTHIA) | LGS |
| SEQ ID NO: 154 | LCDR3 (CHOTHIA) | ALQTPP |
| SEQ ID NO: 149 | LCDR1 (COMBINED) | RSSQSLLHGNRYNYLD |
| SEQ ID NO: 150 | LCDR2 (COMBINED) | LGSNRAS |
| SEQ ID NO: 151 | LCDR3 (COMBINED) | MQALQTPPT |
| SEQ ID NO: 155 | LCDR1 (IMGT) | QSLLHGNRYNY |
| SEQ ID NO: 153 | LCDR2 (IMGT) | LGS |
| SEQ ID NO: 151 | LCDR3 (IMGT) | MQALQTPPT |
| SEQ ID NO: 156 | VL | DIVMTQSPLSLPVTPGEPASISCRSSQSLLHGNRYNYLDW |
| | | YLQKPGQSPQLLIYLGSNRASGVPDRFSGSGSGTDFTLKI |
| | | SRVEAEDVGVYYCMQALQTPPTFGQGTKVEIK |
| SEQ ID NO: 157 | VL DNA | GATATTGTGATGACTCAGTCTCCACTCTCCCTGCCCGTCA |
| | | CCCCTGGAGAGCCGGCCTCCATCTCCTGCAGGTCTAGTCA |
| | | GAGCCTCCTGCATGGTAATCGATACAACTATTTGGATTGG |
| | | TACCTGCAGAAGCCAGGGCAGTCTCCACAGCTCCTGATCT |
| | | ATTTGGGTTCTAATCGGGCCTCCGGGGTCCCTGACAGGTT |
| | | CAGTGGCAGTGGATCAGGCACAGATTTTACACTGAAAATC |
| | | AGCAGAGTGGAGGCTGAGGATGTTGGGGTTTATTACTGCA |
| | | TGCAAGCTCTACAAACTCCTCCGACGTTCGGCCAAGGGAC |
| | | CAAGGTGGAAATCAAA |
| SEQ ID NO: 158 | LC | DIVMTQSPLSLPVTPGEPASISCRSSQSLLHGNRYNYLDW |
| | | YLQKPGQSPQLLIYLGSNRASGVPDRFSGSGSGTDFTLKI |
| | | SRVEAEDVGVYYCMQALQTPPTFGQGTKVEIKRTVAAPSV |
| | | FIFPPSDEQLKSGTASVVCLLNNFYPREAKVQWKVDNALQ |
| | | SGNSQESVTEQDSKDSTYSLSSTLTLSKADYEKHKVYACE |
| | | VTHQGLSSPVTKSFNRGEC |
| SEQ ID NO: 159 | LC DNA | GATATTGTGATGACTCAGTCTCCACTCTCCCTGCCCGTCA |
| | | CCCCTGGAGAGCCGGCCTCCATCTCCTGCAGGTCTAGTCA |
| | | GAGCCTCCTGCATGGTAATCGATACAACTATTTGGATTGG |
| | | TACCTGCAGAAGCCAGGGCAGTCTCCACAGCTCCTGATCT |
| | | ATTTGGGTTCTAATCGGGCCTCCGGGGTCCCTGACAGGTT |
| | | CAGTGGCAGTGGATCAGGCACAGATTTTACACTGAAAATC |
| | | AGCAGAGTGGAGGCTGAGGATGTTGGGGTTTATTACTGCA |
| | | TGCAAGCTCTACAAACTCCTCCGACGTTCGGCCAAGGGAC |
| | | CAAGGTGGAAATCAAACGAACTGTGGCTGCACCAAGCGTG |
| | | TTCATCTTCCCCCCCAGCGACGAGCAGCTGAAGAGTGGCA |
| | | CCGCCAGCGTGGTGTGCCTGCTGAACAACTTCTACCCCCG |
| | | GGAGGCCAAGGTGCAGTGGAAGGTGGACAACGCCCTGCAG |
| | | AGCGGCAACAGCCAGGAGAGCGTCACCGAGCAGGACAGCA |
| | | AGGACTCCACCTACAGCCTGAGCAGCACCCTGACCCTGAG |
| | | CAAGGCCGACTACGAGAAGCATAAGGTGTACGCCTGCGAG |
| | | GTGACCCACCAGGGCCTGTCCAGCCCCGTGACCAAGAGCT |
| | | TCAACAGGGGCGAGTGC |
| ANTI-HUMAN | | |
| ENTPD2 MAB12 | | |
| SEQ ID NO: 160 | HCDR1 (KABAT) | SCS |
| SEQ ID NO: 161 | HCDR2 (KABAT) | YISSSSSTIYYADSVKG |
| SEQ ID NO: 162 | HCDR3 (KABAT) | DQGNWNYDDYYNGLDV |
| SEQ ID NO: 163 | HCDR1 (CHOTHIA) | GFTFNSC |
| SEQ ID NO: 164 | HCDR2 (CHOTHIA) | SSSSST |
| SEQ ID NO: 162 | HCDR3 (CHOTHIA) | DQGNWNYDDYYNGLDV |
| SEQ ID NO: 165 | HCDR1 (COMBINED) | GFTFNSCSMN |
| SEQ ID NO: 161 | HCDR2 (COMBINED) | YISSSSSTIYYADSVKG |
| SEQ ID NO: 162 | HCDR3 (COMBINED) | DQGNWNYDDYYNGLDV |
| SEQ ID NO: 166 | HCDR1 (IMGT) | GFTFNSCS |
| SEQ ID NO: 167 | HCDR2 (IMGT) | ISSSSSTI |
| SEQ ID NO: 168 | HCDR3 (IMGT) | ARDQGNWNYDDYYNGLDV |
| SEQ ID NO: 169 | VH | EVLLVESGGGLVQPGGSLRLSCAASGFTFNSCSMNWVRQA |
| | | PGKGLEWVSYISSSSSTIYYADSVKGRFTISRDNAKNSLY |
| | | LQMNSLKDEDTAVYYCARDQGNWNYDDYYNGLDVWGQGTT |
| | | VTVSS |
| SEQ ID NO: 170 | VH DNA | GAGGTGCTGCTGGTGGAGTCTGGGGGAGGCTTGGTACAGC |
| | | CTGGGGGGTCCCTGAGACTCTCCTGTGCAGCCTCTGGGTT |
| | | CACCTTCAATAGCTGTAGCATGAACTGGGTCCGCCAGGCT |
| | | CCAGGGAAGGGGCTGGAGTGGGTTTCATACATTAGTAGTA |
| | | GTAGTAGTACCATTTACTACGCAGACTCTGTGAAGGGCCG |
| | | ATTCACCATCTCCAGAGACAATGCCAAGAACTCACTGTAT |
| | | CTGCAAATGAACAGCCTGAAAGACGAGGACACGGCTGTGT |
| | | ATTACTGTGCGAGAGATCAGGGTAACTGGAACTACGACGA |
| | | CTACTACAACGGTTTGGACGTCTGGGGCCAAGGGACCACG |
| | | GTCACCGTCTCCTCA |
| SEQ ID NO: 171 | HC | EVLLVESGGGLVQPGGSLRLSCAASGFTFNSCSMNWVRQA |
| | | PGKGLEWVSYISSSSSTIYYADSVKGRFTISRDNAKNSLY |
| | | LQMNSLKDEDTAVYYCARDQGNWNYDDYYNGLDVWGQGTT |
| | | VTVSSASTKGPSVFPLAPSSKSTSGGTAALGCLVKDYFPE |
| | | PVTVSWNSGALTSGVHTFPAVLQSSGLYSLSSVVTVPSSS |
| | | LGTQTYICNVNHKPSNTKVDKRVEPKSCDKTHTCPPCPAP |
| | | ELLGGPSVFLFPPKPKDTLMISRTPEVTCVVVDVSHEDPE |
| | | VKFNWYVDGVEVHNAKTKPREEQYNSTYRVVSVLTVLHQD |
| | | WLNGKEYKCKVSNKALPAPIEKTISKAKGQPREPQVYTLP |
| | | PSREEMTKNQVSLTCLVKGFYPSDIAVEWESNGQPENNYK |
| | | TTPPVLDSDGSFFLYSKLTVDKSRWQQGNVFSCSVMHEAL |
| | | HNHYTQKSLSLSPGK |
| SEQ ID NO: 172 | HC DNA | GAGGTGCTGCTGGTGGAGTCTGGGGGAGGCTTGGTACAGC |
| | | CTGGGGGGTCCCTGAGACTCTCCTGTGCAGCCTCTGGGTT |
| | | CACCTTCAATAGCTGTAGCATGAACTGGGTCCGCCAGGCT |
| | | CCAGGGAAGGGGCTGGAGTGGGTTTCATACATTAGTAGTA |
| | | GTAGTAGTACCATTTACTACGCAGACTCTGTGAAGGGCCG |
| | | ATTCACCATCTCCAGAGACAATGCCAAGAACTCACTGTAT |
| | | CTGCAAATGAACAGCCTGAAAGACGAGGACACGGCTGTGT |
| | | ATTACTGTGCGAGAGATCAGGGTAACTGGAACTACGACGA |
| | | CTACTACAACGGTTTGGACGTCTGGGGCCAAGGGACCACG |
| | | GTCACCGTCTCCTCAGCTAGCACCAAGGGCCCAAGTGTGT |
| | | TTCCCCTGGCCCCCAGCAGCAAGTCTACTTCCGGCGGAAC |
| | | TGCTGCCCTGGGTTGCCTGGTGAAGGACTACTTCCCCGAG |
| | | CCCGTGACAGTGTCCTGGAACTCTGGGGCTCTGACTTCCG |
| | | GCGTGCACACCTTCCCCGCCGTGCTGCAGAGCAGCGGCCT |
| | | GTACAGCCTGAGCAGCGTGGTGACAGTGCCCTCCAGCTCT |
| | | CTGGGAACCCAGACCTATATCTGCAACGTGAACCACAAGC |
| | | CCAGCAACACCAAGGTGGACAAGAGAGTGGAGCCCAAGAG |
| | | CTGCGACAAGACCCACACCTGCCCCCCCTGCCCAGCTCCA |
| | | GAACTGCTGGGAGGGCCTTCCGTGTTCCTGTTCCCCCCCA |
| | | AGCCCAAGGACACCCTGATGATCAGCAGGACCCCCGAGGT |
| | | GACCTGCGTGGTGGTGGACGTGTCCCACGAGGACCCAGAG |
| | | GTGAAGTTCAACTGGTACGTGGACGGCGTGGAGGTGCACA |
| | | ACGCCAAGACCAAGCCCAGAGAGGAGCAGTACAACAGCAC |
| | | CTACAGGGTGGTGTCCGTGCTGACCGTGCTGCACCAGGAC |
| | | TGGCTGAACGGCAAAGAATACAAGTGCAAAGTCTCCAACA |
| | | AGGCCCTGCCAGCCCCAATCGAAAAGACAATCAGCAAGGC |
| | | CAAGGGCCAGCCACGGGAGCCCCAGGTGTACACCCTGCCC |
| | | CCCAGCCGGGAGGAGATGACCAAGAACCAGGTGTCCCTGA |
| | | CCTGTCTGGTGAAGGGCTTCTACCCCAGCGATATCGCCGT |
| | | GGAGTGGGAGAGCAACGGCCAGCCCGAGAACAACTACAAG |
| | | ACCACCCCCCCAGTGCTGGACAGCGACGGCAGCTTCTTCC |
| | | TGTACAGCAAGCTGACCGTGGACAAGTCCAGGTGGCAGCA |
| | | GGGCAACGTGTTCAGCTGCAGCGTGATGCACGAGGCCCTG |
| | | CACAACCACTACACCCAGAAGTCCCTGAGCCTGAGCCCCG |
| | | GCAAG |
| SEQ ID NO: 173 | LCDR1 (KABAT) | RSSQSLLHSNGYNYLD |
| SEQ ID NO: 150 | LCDR2 (KABAT) | LGSNRAS |
| SEQ ID NO: 174 | LCDR3 (KABAT) | MQALQTPLT |
| SEQ ID NO: 175 | LCDR1 (CHOTHIA) | SQSLLHSNGYNY |
| SEQ ID NO: 153 | LCDR2 (CHOTHIA) | LGS |
| SEQ ID NO: 176 | LCDR3 (CHOTHIA) | ALQTPL |
| SEQ ID NO: 173 | LCDR1 (COMBINED) | RSSQSLLHSNGYNYLD |
| SEQ ID NO: 150 | LCDR2 (COMBINED) | LGSNRAS |
| SEQ ID NO: 174 | LCDR3 (COMBINED) | MQALQTPLT |
| SEQ ID NO: 177 | LCDR1 (IMGT) | QSLLHSNGYNY |
| SEQ ID NO: 153 | LCDR2 (IMGT) | LGS |
| SEQ ID NO: 174 | LCDR3 (IMGT) | MQALQTPLT |
| SEQ ID NO: 178 | VL | DIVMTQSPLSLPVTPGEPASISCRSSQSLLHSNGYNYLDW |
| | | YLQKPGQSPQLLIYLGSNRASGVPDRFSGSGSGTDFTLKI |
| | | SRVEAEDVGVYYCMQALQTPLTFGGGTKVEIK |
| SEQ ID NO: 179 | VL DNA | GATATTGTGATGACTCAGTCTCCACTCTCCCTGCCCGTCA |
| | | CTCCTGGAGAGCCGGCCTCCATCTCCTGCAGGTCTAGTCA |
| | | GAGCCTCCTGCATAGTAATGGATACAACTATTTGGATTGG |
| | | TACCTGCAGAAGCCAGGGCAGTCTCCACAGCTCCTGATCT |
| | | ATTTGGGTTCTAATCGGGCCTCCGGGGTCCCTGACAGGTT |
| | | CAGTGGCAGTGGATCAGGCACAGATTTTACACTGAAAATC |
| | | AGCAGAGTGGAGGCTGAGGATGTTGGGGTTTATTACTGCA |
| | | TGCAAGCTCTACAAACTCCTCTCACTTTCGGCGGAGGGAC |
| | | CAAGGTGGAGATCAAA |
| SEQ ID NO: 180 | LC | DIVMTQSPLSLPVTPGEPASISCRSSQSLLHSNGYNYLDW |
| | | YLQKPGQSPQLLIYLGSNRASGVPDRFSGSGSGTDFTLKI |
| | | SRVEAEDVGVYYCMQALQTPLTFGGGTKVEIKRTVAAPSV |
| | | FIFPPSDEQLKSGTASVVCLLNNFYPREAKVQWKVDNALQ |
| | | SGNSQESVTEQDSKDSTYSLSSTLTLSKADYEKHKVYACE |
| | | VTHQGLSSPVTKSFNRGEC |
| SEQ ID NO: 181 | LC DNA | GATATTGTGATGACTCAGTCTCCACTCTCCCTGCCCGTCA |
| | | CTCCTGGAGAGCCGGCCTCCATCTCCTGCAGGTCTAGTCA |
| | | GAGCCTCCTGCATAGTAATGGATACAACTATTTGGATTGG |
| | | TACCTGCAGAAGCCAGGGCAGTCTCCACAGCTCCTGATCT |
| | | ATTTGGGTTCTAATCGGGCCTCCGGGGTCCCTGACAGGTT |
| | | CAGTGGCAGTGGATCAGGCACAGATTTTACACTGAAAATC |
| | | AGCAGAGTGGAGGCTGAGGATGTTGGGGTTTATTACTGCA |
| | | TGCAAGCTCTACAAACTCCTCTCACTTTCGGCGGAGGGAC |
| | | CAAGGTGGAGATCAAACGTACGGTGGCCGCTCCCAGCGTG |
| | | TTCATCTTCCCCCCCAGCGACGAGCAGCTGAAGAGTGGCA |
| | | CCGCCAGCGTGGTGTGCCTGCTGAACAACTTCTACCCCCG |
| | | GGAGGCCAAGGTGCAGTGGAAGGTGGACAACGCCCTGCAG |
| | | AGCGGCAACAGCCAGGAGAGCGTCACCGAGCAGGACAGCA |
| | | AGGACTCCACCTACAGCCTGAGCAGCACCCTGACCCTGAG |
| | | CAAGGCCGACTACGAGAAGCATAAGGTGTACGCCTGCGAG |
| | | GTGACCCACCAGGGCCTGTCCAGCCCCGTGACCAAGAGCT |
| | | TCAACAGGGGCGAGTGC |
| ANTI-HUMAN | | |
| ENTPD2 MAB16 | | |
| SEQ ID NO: 37 | HCDR1 (KABAT) | SGYYWN |
| SEQ ID NO: 220 | HCDR2 (KABAT) | YISYDGDNNYNPSLKN |
| SEQ ID NO: 221 | HCDR3 (KABAT) | GYYRYGLSYYYVMDY |
| SEQ ID NO: 40 | HCDR1 (CHOTHIA) | GYSITSGY |
| SEQ ID NO: 222 | HCDR2 (CHOTHIA) | SYDGD |
| SEQ ID NO: 221 | HCDR3 (CHOTHIA) | GYYRYGLSYYYVMDY |
| SEQ ID NO: 42 | HCDR1 (COMBINED) | GYSITSGYYWN |
| SEQ ID NO: 220 | HCDR2 (COMBINED) | YISYDGDNNYNPSLKN |
| SEQ ID NO: 221 | HCDR3 (COMBINED) | GYYRYGLSYYYVMDY |
| SEQ ID NO: 43 | HCDR1 (IMGT) | GYSITSGYY |
| SEQ ID NO: 223 | HCDR2 (IMGT) | ISYDGDN |
| SEQ ID NO: 224 | HCDR3 (IMGT) | AGGYYRYGLSYYYVMDY |
| SEQ ID NO: 225 | VH | DIQLQESGPGLVKPSQSLSLTCSVTGYSITSGYYWNWIRQ |
| | | FPGNKLEWMGYISYDGDNNYNPSLKNRISITRDTSKNQFF |
| | | LKLSSVTTEDTATYYCAGGYYRYGLSYYYVMDYWGQGTSV |
| | | TVSS |
| SEQ ID NO: 226 | VH DNA | GATATACAGCTTCAGGAGTCAGGACCTGGCCTCGTGAAAC |
| | | CTTCTCAGTCTCTGTCTCTCACCTGCTCTGTCACTGGCTA |
| | | CTCCATCACCAGTGGTTATTACTGGAACTGGATCCGGCAG |
| | | TTTCCAGGAAACAAACTGGAATGGATGGGCTACATAAGCT |
| | | ACGACGGTGACAATAACTACAACCCATCTCTCAAAAATCG |
| | | AATCTCCATCACTCGTGACACATCTAAGAACCAGTTTTTC |
| | | CTGAAGTTGAGTTCTGTGACTACTGAGGACACAGCTACAT |
| | | ATTACTGTGCAGGAGGCTACTATAGGTACGGCCTGTCGTA |
| | | TTACTATGTTATGGACTACTGGGGTCAAGGAACCTCAGTC |
| | | ACCGTCTCCTCA |
| SEQ ID NO: 227 | HC | DIQLQESGPGLVKPSQSLSLTCSVTGYSITSGYYWNWIRQ |
| | | FPGNKLEWMGYISYDGDNNYNPSLKNRISITRDTSKNQFF |
| | | LKLSSVTTEDTATYYCAGGYYRYGLSYYYVMDYWGQGTSV |
| | | TVSSASTKGPSVFPLAPSSKSTSGGTAALGCLVKDYFPEP |
| | | VTVSWNSGALTSGVHTFPAVLQSSGLYSLSSVVTVPSSSL |
| | | GTQTYICNVNHKPSNTKVDKRVEPKSCDKTHTCPPCPAPE |
| | | LLGGPSVFLFPPKPKDTLMISRTPEVTCVVVDVSHEDPEV |
| | | KFNWYVDGVEVHNAKTKPREEQYNSTYRVVSVLTVLHQDW |
| | | LNGKEYKCKVSNKALPAPIEKTISKAKGQPREPQVYTLPP |
| | | SREEMTKNQVSLTCLVKGFYPSDIAVEWESNGQPENNYKT |
| | | TPPVLDSDGSFFLYSKLTVDKSRWQQGNVFSCSVMHEALH |
| | | NHYTQKSLSLSPGK |
| SEQ ID NO: 228 | HC DNA | GATATACAGCTTCAGGAGTCAGGACCTGGCCTCGTGAAAC |
| | | CTTCTCAGTCTCTGTCTCTCACCTGCTCTGTCACTGGCTA |
| | | CTCCATCACCAGTGGTTATTACTGGAACTGGATCCGGCAG |
| | | TTTCCAGGAAACAAACTGGAATGGATGGGCTACATAAGCT |
| | | ACGACGGTGACAATAACTACAACCCATCTCTCAAAAATCG |
| | | AATCTCCATCACTCGTGACACATCTAAGAACCAGTTTTTC |
| | | CTGAAGTTGAGTTCTGTGACTACTGAGGACACAGCTACAT |
| | | ATTACTGTGCAGGAGGCTACTATAGGTACGGCCTGTCGTA |
| | | TTACTATGTTATGGACTACTGGGGTCAAGGAACCTCAGTC |
| | | ACCGTCTCCTCAGCTAGCACCAAGGGCCCAAGTGTGTTTC |
| | | CCCTGGCCCCCAGCAGCAAGTCTACTTCCGGCGGAACTGC |
| | | TGCCCTGGGTTGCCTGGTGAAGGACTACTTCCCCGAGCCC |
| | | GTGACAGTGTCCTGGAACTCTGGGGCTCTGACTTCCGGCG |
| | | TGCACACCTTCCCCGCCGTGCTGCAGAGCAGCGGCCTGTA |
| | | CAGCCTGAGCAGCGTGGTGACAGTGCCCTCCAGCTCTCTG |
| | | GGAACCCAGACCTATATCTGCAACGTGAACCACAAGCCCA |
| | | GCAACACCAAGGTGGACAAGAGAGTGGAGCCCAAGAGCTG |
| | | CGACAAGACCCACACCTGCCCCCCCTGCCCAGCTCCAGAA |
| | | CTGCTGGGAGGGCCTTCCGTGTTCCTGTTCCCCCCCAAGC |
| | | CCAAGGACACCCTGATGATCAGCAGGACCCCCGAGGTGAC |
| | | CTGCGTGGTGGTGGACGTGTCCCACGAGGACCCAGAGGTG |
| | | AAGTTCAACTGGTACGTGGACGGCGTGGAGGTGCACAACG |
| | | CCAAGACCAAGCCCAGAGAGGAGCAGTACAACAGCACCTA |
| | | CAGGGTGGTGTCCGTGCTGACCGTGCTGCACCAGGACTGG |
| | | CTGAACGGCAAAGAATACAAGTGCAAAGTCTCCAACAAGG |
| | | CCCTGCCAGCCCCAATCGAAAAGACAATCAGCAAGGCCAA |
| | | GGGCCAGCCACGGGAGCCCCAGGTGTACACCCTGCCCCCC |
| | | AGCCGGGAGGAGATGACCAAGAACCAGGTGTCCCTGACCT |
| | | GTCTGGTGAAGGGCTTCTACCCCAGCGATATCGCCGTGGA |
| | | GTGGGAGAGCAACGGCCAGCCCGAGAACAACTACAAGACC |
| | | ACCCCCCCAGTGCTGGACAGCGACGGCAGCTTCTTCCTGT |
| | | ACAGCAAGCTGACCGTGGACAAGTCCAGGTGGCAGCAGGG |
| | | CAACGTGTTCAGCTGCAGCGTGATGCACGAGGCCCTGCAC |
| | | AACCACTACACCCAGAAGTCCCTGAGCCTGAGCCCCGGCA |
| | | AG |
| SEQ ID NO: 61 | LCDR1 (KABAT) | KASQSVDYDGNSYMN |
| SEQ ID NO: 51 | LCDR2 (KABAT) | AASNLES |
| SEQ ID NO: 52 | LCDR3 (KABAT) | QQSNEDPPT |
| SEQ ID NO: 62 | LCDR1 (CHOTHIA) | SQSVDYDGNSY |
| SEQ ID NO: 54 | LCDR2 (CHOTHIA) | AAS |
| SEQ ID NO: 55 | LCDR3 (CHOTHIA) | SNEDPP |
| SEQ ID NO: 61 | LCDR1 (COMBINED) | KASQSVDYDGNSYMN |
| SEQ ID NO: 51 | LCDR2 (COMBINED) | AASNLES |
| SEQ ID NO: 52 | LCDR3 (COMBINED) | QQSNEDPPT |
| SEQ ID NO: 63 | LCDR1 (IMGT) | QSVDYDGNSY |
| SEQ ID NO: 54 | LCDR2 (IMGT) | AAS |
| SEQ ID NO: 52 | LCDR3 (IMGT) | QQSNEDPPT |
| SEQ ID NO: 229 | VL | DTVLTQSPASLAVSLGQRATISCKASQSVDYDGNSYMNWY |
| | | QQKPGQPPKLLIYAASNLESGIPARFSGSGSGTDFTLNIH |
| | | PVEEEDAATYYCQQSNEDPPTFGGGTKLEIK |
| SEQ ID NO: 230 | VL DNA | GACACTGTGCTGACCCAATCTCCAGCCTCTTTGGCTGTGT |
| | | CTCTAGGGCAGAGGGCCACCATCTCCTGCAAGGCCAGCCA |
| | | AAGTGTTGATTATGATGGTAATAGTTATATGAACTGGTAC |
| | | CAACAGAAACCAGGACAGCCACCCAAACTCCTCATCTATG |
| | | CTGCATCCAATCTAGAATCTGGGATCCCAGCCAGGTTTAG |
| | | TGGCAGTGGGTCTGGGACAGACTTCACCCTCAACATCCAT |
| | | CCTGTGGAGGAGGAGGATGCTGCAACCTATTACTGTCAGC |
| | | AAAGTAATGAGGATCCTCCGACGTTCGGTGGAGGCACCAA |
| | | GCTGGAAATCAAA |
| SEQ ID NO: 231 | LC | DTVLTQSPASLAVSLGQRATISCKASQSVDYDGNSYMNWY |
| | | QQKPGQPPKLLIYAASNLESGIPARFSGSGSGTDFTLNIH |
| | | PVEEEDAATYYCQQSNEDPPTFGGGTKLEIKRTVAAPSVF |
| | | IFPPSDEQLKSGTASVVCLLNNFYPREAKVQWKVDNALQS |
| | | GNSQESVTEQDSKDSTYSLSSTLTLSKADYEKHKVYACEV |
| | | THQGLSSPVTKSFNRGEC |
| SEQ ID NO: 232 | LC DNA | GACACTGTGCTGACCCAATCTCCAGCCTCTTTGGCTGTGT |
| | | CTCTAGGGCAGAGGGCCACCATCTCCTGCAAGGCCAGCCA |
| | | AAGTGTTGATTATGATGGTAATAGTTATATGAACTGGTAC |
| | | CAACAGAAACCAGGACAGCCACCCAAACTCCTCATCTATG |
| | | CTGCATCCAATCTAGAATCTGGGATCCCAGCCAGGTTTAG |
| | | TGGCAGTGGGTCTGGGACAGACTTCACCCTCAACATCCAT |
| | | CCTGTGGAGGAGGAGGATGCTGCAACCTATTACTGTCAGC |
| | | AAAGTAATGAGGATCCTCCGACGTTCGGTGGAGGCACCAA |
| | | GCTGGAAATCAAACGTACGGTGGCCGCTCCCAGCGTGTTC |
| | | ATCTTCCCCCCCAGCGACGAGCAGCTGAAGAGTGGCACCG |
| | | CCAGCGTGGTGTGCCTGCTGAACAACTTCTACCCCCGGGA |
| | | GGCCAAGGTGCAGTGGAAGGTGGACAACGCCCTGCAGAGC |
| | | GGCAACAGCCAGGAGAGCGTCACCGAGCAGGACAGCAAGG |
| | | ACTCCACCTACAGCCTGAGCAGCACCCTGACCCTGAGCAA |
| | | GGCCGACTACGAGAAGCATAAGGTGTACGCCTGCGAGGTG |
| | | ACCCACCAGGGCCTGTCCAGCCCCGTGACCAAGAGCTTCA |
| | | ACAGGGGCGAGTGC |
| ANTI-HUMAN | | |
| ENTPD2 MAB17 | | |
| SEQ ID NO: 1 | HCDR1 (KABAT) | DYNMD |
| SEQ ID NO: 2 | HCDR2 (KABAT) | DINPKYDISTYNQQFKG |
| SEQ ID NO: 3 | HCDR3 (KABAT) | RGEFLYYGINYYYFDV |
| SEQ ID NO: 4 | HCDR1 (CHOTHIA) | GYTFTDY |
| SEQ ID NO: 5 | HCDR2 (CHOTHIA) | NPKYDI |
| SEQ ID NO: 3 | HCDR3 (CHOTHIA) | RGEFLYYGINYYYFDV |
| SEQ ID NO: 6 | HCDR1 (COMBINED) | GYTFTDYNMD |
| SEQ ID NO: 2 | HCDR2 (COMBINED) | DINPKYDISTYNQQFKG |
| SEQ ID NO: 3 | HCDR3 (COMBINED) | RGEFLYYGINYYYFDV |
| SEQ ID NO: 7 | HCDR1 (IMGT) | GYTFTDYN |
| SEQ ID NO: 8 | HCDR2 (IMGT) | INPKYDIS |
| SEQ ID NO: 9 | HCDR3 (IMGT) | ARRGEFLYYGINYYYFDV |
| SEQ ID NO: 233 | VH | EVQLQQFGAELVKPGASVKISCKASGYTFTDYNMDWVKQS |
| | | HGKSLEWIGDINPKYDISTYNQQFKGKATLTVDKSSSTAY |
| | | MELRSLTSEDTAVYYCARRGEFLYYGINYYYFDVVVGAGT |
| | | TVTVSS |
| SEQ ID NO: 234 | VH DNA | GAGGTCCAACTGCAACAGTTTGGAGCTGAACTGGTGAAGC |
| | | CTGGGGCTTCAGTGAAGATATCCTGCAAGGCTTCTGGCTA |
| | | CACATTCACTGACTACAACATGGACTGGGTGAAGCAGAGC |
| | | CATGGAAAGAGCCTTGAGTGGATTGGAGATATTAATCCTA |
| | | AGTATGATATTTCTACCTACAATCAGCAATTCAAGGGAAA |
| | | GGCCACATTGACTGTAGACAAGTCCTCCAGCACAGCCTAC |
| | | ATGGAGCTCCGCAGCCTGACATCTGAGGACACTGCAGTCT |
| | | ATTATTGTGCAAGAAGAGGCTTTTTTCTTTACTACGGTAT |
| | | TAACTACTATTACTTCGATGTCTGGGGCGCAGGGACCACG |
| | | GTCACCGTCTCCTCA |
| SEQ ID NO: 235 | HC | EVQLQQFGAELVKPGASVKISCKASGYTFTDYNMDWVKQS |
| | | HGKSLEWIGDINPKYDISTYNQQFKGKATLTVDKSSSTAY |
| | | MELRSLTSEDTAVYYCARRGEFLYYGINYYYFDVVVGAGT |
| | | TVTVSSASTKGPSVFPLAPSSKSTSGGTAALGCLVKDYFP |
| | | EPVTVSWNSGALTSGVHTFPAVLQSSGLYSLSSVVTVPSS |
| | | SLGTQTYICNVNHKPSNTKVDKRVEPKSCDKTHTCPPCPA |
| | | PELLGGPSVFLFPPKPKDTLMISRTPEVTCVVVDVSHEDP |
| | | EVKFNVVYVDGVEVHNAKTKPREEQYNSTYRVVSVLTVLH |
| | | QDWLNGKEYKCKVSNKALPAPIEKTISKAKGQPREPQVYT |
| | | LPPSREEMTKNQVSLTCLVKGFYPSDIAVEWESNGQPENN |
| | | YKTTPPVLDSDGSFFLYSKLTVDKSRWQQGNVFSCSVMHE |
| | | ALHNHYTQKSLSLSPGK |
| SEQ ID NO: 236 | HC DNA | GAGGTCCAACTGCAACAGTTTGGAGCTGAACTGGTGAAGC |
| | | CTGGGGCTTCAGTGAAGATATCCTGCAAGGCTTCTGGCTA |
| | | CACATTCACTGACTACAACATGGACTGGGTGAAGCAGAGC |
| | | CATGGAAAGAGCCTTGAGTGGATTGGAGATATTAATCCTA |
| | | AGTATGATATTTCTACCTACAATCAGCAATTCAAGGGAAA |
| | | GGCCACATTGACTGTAGACAAGTCCTCCAGCACAGCCTAC |
| | | ATGGAGCTCCGCAGCCTGACATCTGAGGACACTGCAGTCT |
| | | ATTATTGTGCAAGAAGAGGCTTTTTTCTTTACTACGGTAT |
| | | TAACTACTATTACTTCGATGTCTGGGGCGCAGGGACCACG |
| | | GTCACCGTCTCCTCAGCTAGCACCAAGGGCCCAAGTGTGT |
| | | TTCCCCTGGCCCCCAGCAGCAAGTCTACTTCCGGCGGAAC |
| | | TGCTGCCCTGGGTTGCCTGGTGAAGGACTACTTCCCCGAG |
| | | CCCGTGACAGTGTCCTGGAACTCTGGGGCTCTGACTTCCG |
| | | GCGTGCACACCTTCCCCGCCGTGCTGCAGAGCAGCGGCCT |
| | | GTACAGCCTGAGCAGCGTGGTGACAGTGCCCTCCAGCTCT |
| | | CTGGGAACCCAGACCTATATCTGCAACGTGAACCACAAGC |
| | | CCAGCAACACCAAGGTGGACAAGAGAGTGGAGCCCAAGAG |
| | | CTGCGACAAGACCCACACCTGCCCCCCCTGCCCAGCTCCA |
| | | GAACTGCTGGGAGGGCCTTCCGTGTTCCTGTTCCCCCCCA |
| | | AGCCCAAGGACACCCTGATGATCAGCAGGACCCCCGAGGT |
| | | GACCTGCGTGGTGGTGGACGTGTCCCACGAGGACCCAGAG |
| | | GTGAAGTTCAACTGGTACGTGGACGGCGTGGAGGTGCACA |
| | | ACGCCAAGACCAAGCCCAGAGAGGAGCAGTACAACAGCAC |
| | | CTACAGGGTGGTGTCCGTGCTGACCGTGCTGCACCAGGAC |
| | | TGGCTGAACGGCAAAGAATACAAGTGCAAAGTCTCCAACA |
| | | AGGCCCTGCCAGCCCCAATCGAAAAGACAATCAGCAAGGC |
| | | CAAGGGCCAGCCACGGGAGCCCCAGGTGTACACCCTGCCC |
| | | CCCAGCCGGGAGGAGATGACCAAGAACCAGGTGTCCCTGA |
| | | CCTGTCTGGTGAAGGGCTTCTACCCCAGCGATATCGCCGT |
| | | GGAGTGGGAGAGCAACGGCCAGCCCGAGAACAACTACAAG |
| | | ACCACCCCCCCAGTGCTGGACAGCGACGGCAGCTTCTTCC |
| | | TGTACAGCAAGCTGACCGTGGACAAGTCCAGGTGGCAGCA |
| | | GGGCAACGTGTTCAGCTGCAGCGTGATGCACGAGGCCCTG |
| | | CACAACCACTACACCCAGAAGTCCCTGAGCCTGAGCCCCG |
| | | GCAAG |
| SEQ ID NO: 14 | LCDR1 (KABAT) | SASSSVSYIH |
| SEQ ID NO: 15 | LCDR2 (KABAT) | STSNLAS |
| SEQ ID NO: 16 | LCDR3 (KABAT) | HQWSSYPWT |
| SEQ ID NO: 17 | LCDR1 (CHOTHIA) | SSSVSY |
| SEQ ID NO: 18 | LCDR2 (CHOTHIA) | STS |
| SEQ ID NO: 19 | LCDR3 (CHOTHIA) | WSSYPW |
| SEQ ID NO: 14 | LCDR1 (COMBINED) | SASSSVSYIH |
| SEQ ID NO: 15 | LCDR2 (COMBINED) | STSNLAS |
| SEQ ID NO: 16 | LCDR3 (COMBINED) | HQWSSYPWT |
| SEQ ID NO: 20 | LCDR1 (IMGT) | SSVSY |
| SEQ ID NO: 18 | LCDR2 (IMGT) | STS |
| SEQ ID NO: 16 | LCDR3 (IMGT) | HQWSSYPWT |
| SEQ ID NO: 237 | VL | QIVLTQSPAIMSASLGEEITLTCSASSSVSYIHWYQQKSG |
| | | TSPTLLIYSTSNLASGVPSRFSGSGSGTFYSLTISSVEAE |
| | | DAADYYCHQWSSYPWTFGGGTKLEIK |
| SEQ ID NO: 238 | VL DNA | CAAATTGTTCTCACCCAGTCTCCAGCAATCATGTCTGCAT |
| | | CTCTAGGGGAGGAGATCACCCTAACCTGCAGTGCCAGCTC |
| | | GAGTGTAAGTTACATACACTGGTACCAGCAGAAGTCAGGC |
| | | ACTTCTCCCACACTCTTGATTTATAGCACATCCAATCTGG |
| | | CTTCTGGAGTCCCTTCTCGCTTCAGTGGCAGTGGGTCTGG |
| | | GACCTTTTATTCTCTCACAATCAGCAGTGTGGAGGCTGAA |
| | | GATGCTGCCGATTATTACTGCCATCAGTGGAGTAGTTATC |
| | | CATGGACGTTCGGTGGAGGCACCAAGCTGGAAATCAAA |
| SEQ ID NO: 239 | LC | QIVLTQSPAIMSASLGEEITLTCSASSSVSYIHWYQQKSG |
| | | TSPTLLIYSTSNLASGVPSRFSGSGSGTFYSLTISSVEAE |
| | | DAADYYCHQWSSYPWTFGGGTKLEIKRTVAAPSVFIFPPS |
| | | DEQLKSGTASVVCLLNNFYPREAKVQWKVDNALQSGNSQE |
| | | SVTEQDSKDSTYSLSSTLTLSKADYEKHKVYACEVTHQGL |
| | | SSPVTKSFNRGEC |
| SEQ ID NO: 240 | LC DNA | CAAATTGTTCTCACCCAGTCTCCAGCAATCATGTCTGCAT |
| | | CTCTAGGGGAGGAGATCACCCTAACCTGCAGTGCCAGCTC |
| | | GAGTGTAAGTTACATACACTGGTACCAGCAGAAGTCAGGC |
| | | ACTTCTCCCACACTCTTGATTTATAGCACATCCAATCTGG |
| | | CTTCTGGAGTCCCTTCTCGCTTCAGTGGCAGTGGGTCTGG |
| | | GACCTTTTATTCTCTCACAATCAGCAGTGTGGAGGCTGAA |
| | | GATGCTGCCGATTATTACTGCCATCAGTGGAGTAGTTATC |
| | | CATGGACGTTCGGTGGAGGCACCAAGCTGGAAATCAAACG |
| | | TACGGTGGCCGCTCCCAGCGTGTTCATCTTCCCCCCCAGC |
| | | GACGAGCAGCTGAAGAGTGGCACCGCCAGCGTGGTGTGCC |
| | | TGCTGAACAACTTCTACCCCCGGGAGGCCAAGGTGCAGTG |
| | | GAAGGTGGACAACGCCCTGCAGAGCGGCAACAGCCAGGAG |
| | | AGCGTCACCGAGCAGGACAGCAAGGACTCCACCTACAGCC |
| | | TGAGCAGCACCCTGACCCTGAGCAAGGCCGACTACGAGAA |
| | | GCATAAGGTGTACGCCTGCGAGGTGACCCACCAGGGCCTG |
| | | TCCAGCCCCGTGACCAAGAGCTTCAACAGGGGCGAGTGC |
| ANTI-HUMAN | | |
| ENTPD2 MAB18 | | |
| SEQ ID NO: 37 | HCDR1 (KABAT) | SGYYWN |
| SEQ ID NO: 220 | HCDR2 (KABAT) | YISYDGDNNYNPSLKN |
| SEQ ID NO: 68 | HCDR3 (KABAT) | GYYRYGLGSYSGSYYYVMDY |
| SEQ ID NO: 40 | HCDR1 (CHOTHIA) | GYSITSGY |
| SEQ ID NO: 222 | HCDR2 (CHOTHIA) | SYDGD |
| SEQ ID NO: 68 | HCDR3 (CHOTHIA) | GYYRYGLGSYSGSYYYVMDY |
| SEQ ID NO: 42 | HCDR1 (COMBINED) | GYSITSGYYWN |
| SEQ ID NO: 220 | HCDR2 (COMBINED) | YISYDGDNNYNPSLKN |
| SEQ ID NO: 68 | HCDR3(COMBINED) | GYYRYGLGSYSGSYYYVMDY |
| SEQ ID NO: 43 | HCDR1 (IMGT) | GYSITSGYY |
| SEQ ID NO: 223 | HCDR2 (IMGT) | ISYDGDN |
| SEQ ID NO: 69 | HCDR3 (IMGT) | AGGYYRYGLGSYSGSYYYVMDY |
| SEQ ID NO: 241 | VH | DIQLQESGPGLVKPSQSLSLTCSVTGYSITSGYYWNWIRQ |
| | | FPGNKLEWMGYISYDGDNNYNPSLKNRISITRDTSKNQFF |
| | | LKLSSVTTEDTATYYCAGGYYRYGLGSYSGSYYYVMDYWG |
| | | QGTSVTVSS |
| SEQ ID NO: 242 | VH DNA | GATATACAGCTTCAGGAGTCAGGACCTGGCCTCGTGAAAC |
| | | CTTCTCAGTCTCTGTCTCTCACCTGCTCTGTCACTGGCTA |
| | | CTCCATCACCAGTGGTTATTACTGGAACTGGATCCGGCAG |
| | | TTTCCAGGAAACAAACTGGAATGGATGGGCTACATAAGCT |
| | | ACGACGGTGACAATAACTACAACCCATCTCTCAAAAATCG |
| | | AATCTCCATCACTCGTGACACATCTAAGAACCAGTTTTTC |
| | | CTGAAGTTGAGTTCTGTGACTACTGAGGACACAGCTACAT |
| | | ATTACTGTGCAGGAGGCTACTATAGGTACGGCCTGGGCTC |
| | | CTACTCCGGCTCGTATTACTATGTTATGGACTACTGGGGT |
| | | CAAGGAACCTCAGTCACCGTCTCCTCA |
| SEQ ID NO: 243 | HC | DIQLQESGPGLVKPSQSLSLTCSVTGYSITSGYYWNWIRQ |
| | | FPGNKLEWMGYISYDGDNNYNPSLKNRISITRDTSKNQFF |
| | | LKLSSVTTEDTATYYCAGGYYRYGLGSYSGSYYYVMDYWG |
| | | QGTSVTVSSASTKGPSVFPLAPSSKSTSGGTAALGCLVKD |
| | | YFPEPVTVSWNSGALTSGVHTFPAVLQSSGLYSLSSVVTV |
| | | PSSSLGTQTYICNVNHKPSNTKVDKRVEPKSCDKTHTCPP |
| | | CPAPELLGGPSVFLFPPKPKDTLMISRTPEVTCVVVDVSH |
| | | EDPEVKFNWYVDGVEVHNAKTKPREEQYNSTYRVVSVLTV |
| | | LHQDWLNGKEYKCKVSNKALPAPIEKTISKAKGQPREPQV |
| | | YTLPPSREEMTKNQVSLTCLVKGFYPSDIAVEWESNGQPE |
| | | NNYKTTPPVLDSDGSFFLYSKLTVDKSRWQQGNVFSCSVM |
| | | HEALHNHYTQKSLSLSPGK |
| SEQ ID NO: 244 | HC DNA | GATATACAGCTTCAGGAGTCAGGACCTGGCCTCGTGAAAC |
| | | CTTCTCAGTCTCTGTCTCTCACCTGCTCTGTCACTGGCTA |
| | | CTCCATCACCAGTGGTTATTACTGGAACTGGATCCGGCAG |
| | | TTTCCAGGAAACAAACTGGAATGGATGGGCTACATAAGCT |
| | | ACGACGGTGACAATAACTACAACCCATCTCTCAAAAATCG |
| | | AATCTCCATCACTCGTGACACATCTAAGAACCAGTTTTTC |
| | | CTGAAGTTGAGTTCTGTGACTACTGAGGACACAGCTACAT |
| | | ATTACTGTGCAGGAGGCTACTATAGGTACGGCCTGGGCTC |
| | | CTACTCCGGCTCGTATTACTATGTTATGGACTACTGGGGT |
| | | CAAGGAACCTCAGTCACCGTCTCCTCAGCTAGCACCAAGG |
| | | GCCCAAGTGTGTTTCCCCTGGCCCCCAGCAGCAAGTCTAC |
| | | TTCCGGCGGAACTGCTGCCCTGGGTTGCCTGGTGAAGGAC |
| | | TACTTCCCCGAGCCCGTGACAGTGTCCTGGAACTCTGGGG |
| | | CTCTGACTTCCGGCGTGCACACCTTCCCCGCCGTGCTGCA |
| | | GAGCAGCGGCCTGTACAGCCTGAGCAGCGTGGTGACAGTG |
| | | CCCTCCAGCTCTCTGGGAACCCAGACCTATATCTGCAACG |
| | | TGAACCACAAGCCCAGCAACACCAAGGTGGACAAGAGAGT |
| | | GGAGCCCAAGAGCTGCGACAAGACCCACACCTGCCCCCCC |
| | | TGCCCAGCTCCAGAACTGCTGGGAGGGCCTTCCGTGTTCC |
| | | TGTTCCCCCCCAAGCCCAAGGACACCCTGATGATCAGCAG |
| | | GACCCCCGAGGTGACCTGCGTGGTGGTGGACGTGTCCCAC |
| | | GAGGACCCAGAGGTGAAGTTCAACTGGTACGTGGACGGCG |
| | | TGGAGGTGCACAACGCCAAGACCAAGCCCAGAGAGGAGCA |
| | | GTACAACAGCACCTACAGGGTGGTGTCCGTGCTGACCGTG |
| | | CTGCACCAGGACTGGCTGAACGGCAAAGAATACAAGTGCA |
| | | AAGTCTCCAACAAGGCCCTGCCAGCCCCAATCGAAAAGAC |
| | | AATCAGCAAGGCCAAGGGCCAGCCACGGGAGCCCCAGGTG |
| | | TACACCCTGCCCCCCAGCCGGGAGGAGATGACCAAGAACC |
| | | AGGTGTCCCTGACCTGTCTGGTGAAGGGCTTCTACCCCAG |
| | | CGATATCGCCGTGGAGTGGGAGAGCAACGGCCAGCCCGAG |
| | | AACAACTACAAGACCACCCCCCCAGTGCTGGACAGCGACG |
| | | GCAGCTTCTTCCTGTACAGCAAGCTGACCGTGGACAAGTC |
| | | CAGGTGGCAGCAGGGCAACGTGTTCAGCTGCAGCGTGATG |
| | | CACGAGGCCCTGCACAACCACTACACCCAGAAGTCCCTGA |
| | | GCCTGAGCCCCGGCAAG |
| SEQ ID NO: 61 | LCDR1 (KABAT) | KASQSVDYDGNSYMN |
| SEQ ID NO: 51 | LCDR2 (KABAT) | AASNLES |
| SEQ ID NO: 52 | LCDR3 (KABAT) | QQSNEDPPT |
| SEQ ID NO: 62 | LCDR1 (CHOTHIA) | SQSVDYDGNSY |
| SEQ ID NO: 54 | LCDR2 (CHOTHIA) | AAS |
| SEQ ID NO: 55 | LCDR3 (CHOTHIA) | SNEDPP |
| SEQ ID NO: 61 | LCDR1 (COMBINED) | KASQSVDYDGNSYMN |
| SEQ ID NO: 51 | LCDR2 (COMBINED) | AASNLES |
| SEQ ID NO: 52 | LCDR3 (COMBINED) | QQSNEDPPT |
| SEQ ID NO: 63 | LCDR1 (IMGT) | QSVDYDGNSY |
| SEQ ID NO: 54 | LCDR2 (IMGT) | AAS |
| SEQ ID NO: 52 | LCDR3 (IMGT) | QQSNEDPPT |
| SEQ ID NO: 229 | VL | DTVLTQSPASLAVSLGQRATISCKASQSVDYDGNSYMNWY |
| | | QQKPGQPPKLLIYAASNLESGIPARFSGSGSGTDFTLNIH |
| | | PVEEEDAATYYCQQSNEDPPTFGGGTKLEIK |
| SEQ ID NO: 230 | VL DNA | GACACTGTGCTGACCCAATCTCCAGCCTCTTTGGCTGTGT |
| | | CTCTAGGGCAGAGGGCCACCATCTCCTGCAAGGCCAGCCA |
| | | AAGTGTTGATTATGATGGTAATAGTTATATGAACTGGTAC |
| | | CAACAGAAACCAGGACAGCCACCCAAACTCCTCATCTATG |
| | | CTGCATCCAATCTAGAATCTGGGATCCCAGCCAGGTTTAG |
| | | TGGCAGTGGGTCTGGGACAGACTTCACCCTCAACATCCAT |
| | | CCTGTGGAGGAGGAGGATGCTGCAACCTATTACTGTCAGC |
| | | AAAGTAATGAGGATCCTCCGACGTTCGGTGGAGGCACCAA |
| | | GCTGGAAATCAAA |
| SEQ ID NO: 231 | LC | DTVLTQSPASLAVSLGQRATISCKASQSVDYDGNSYMNWY |
| | | QQKPGQPPKLLIYAASNLESGIPARFSGSGSGTDFTLNIH |
| | | PVEEEDAATYYCQQSNEDPPTFGGGTKLEIKRTVAAPSVF |
| | | IFPPSDEQLKSGTASVVCLLNNFYPREAKVQWKVDNALQS |
| | | GNSQESVTEQDSKDSTYSLSSTLTLSKADYEKHKVYACEV |
| | | THQGLSSPVTKSFNRGEC |
| SEQ ID NO: 232 | LC DNA | GACACTGTGCTGACCCAATCTCCAGCCTCTTTGGCTGTGT |
| | | TCTAGGGCAGAGGGCCACCATCTCCTGCAAGGCCAGCCAA |
| | | AGTGTTGATTATGATGGTAATAGTTATATGAACTGGTACC |
| | | AACAGAAACCAGGACAGCCACCCAAACTCCTCATCTATGC |
| | | TGCATCCAATCTAGAATCTGGGATCCCAGCCAGGTTTAGT |
| | | GGCAGTGGGTCTGGGACAGACTTCACCCTCAACATCCATC |
| | | CTGTGGAGGAGGAGGATGCTGCAACCTATTACTGTCAGCA |
| | | AAGTAATGAGGATCCTCCGACGTTCGGTGGAGGCACCAAG |
| | | CTGGAAATCAAACGTACGGTGGCCGCTCCCAGCGTGTTCA |
| | | TCTTCCCCCCCAGCGACGAGCAGCTGAAGAGTGGCACCGC |
| | | CAGCGTGGTGTGCCTGCTGAACAACTTCTACCCCCGGGAG |
| | | GCCAAGGTGCAGTGGAAGGTGGACAACGCCCTGCAGAGCG |
| | | GCAACAGCCAGGAGAGCGTCACCGAGCAGGACAGCAAGGA |
| | | CTCCACCTACAGCCTGAGCAGCACCCTGACCCTGAGCAAG |
| | | GCCGACTACGAGAAGCATAAGGTGTACGCCTGCGAGGTGA |
| | | CCCACCAGGGCCTGTCCAGCCCCGTGACCAAGAGCTTCAA |
| | | CAGGGGCGAGTGC |
| ANTI-HUMAN | | |
| ENTPD2 MAB19 | | |
| SEQ ID NO: 1 | HCDR1 (KABAT) | DYNMD |
| SEQ ID NO: 245 | HCDR2 (KABAT) | DINPNYDITTYNQRFKG |
| SEQ ID NO: 246 | HCDR3 (KABAT) | RGFFPYYGNSYYYFDV |
| SEQ ID NO: 4 | HCDR1 (CHOTHIA) | GYTFTDY |
| SEQ ID NO: 247 | HCDR2 (CHOTHIA) | NPNYDI |
| SEQ ID NO: 246 | HCDR3 (CHOTHIA) | RGFFPYYGNSYYYFDV |
| SEQ ID NO: 6 | HCDR1 (COMBINED) | GYTFTDYNMD |
| SEQ ID NO: 245 | HCDR2 (COMBINED) | DINPNYDITTYNQRFKG |
| SEQ ID NO: 246 | HCDR3 (COMBINED) | RGFFPYYGNSYYYFDV |
| SEQ ID NO: 7 | HCDR1 (IMGT) | GYTFTDYN |
| SEQ ID NO: 248 | HCDR2 (IMGT) | INPNYDIT |
| SEQ ID NO: 249 | HCDR3 (IMGT) | ARRGFFPYYGNSYYYFDV |
| SEQ ID NO: 250 | VH | EVQLQQFGAELVKPGTSVKISCKASGYTFTDYNMDWVKQS |
| | | HGKSLEWIGDINPNYDITTYNQRFKGKATLTVDKSSSTAY |
| | | MELRSLTSEDTAVYYCARRGFFPYYGNSYYYFDVVVGAGT |
| | | TVTVSS |
| SEQ ID NO: 251 | VH DNA | GAGGTCCAGCTGCAACAGTTTGGAGCTGAGCTGGTGAAGC |
| | | CTGGGACTTCAGTGAAGATATCCTGCAAGGCTTCTGGCTA |
| | | CACATTCACTGACTACAACATGGACTGGGTGAAGCAGAGC |
| | | CATGGAAAGAGCCTTGAGTGGATTGGAGATATTAATCCTA |
| | | ACTATGATATTACTACCTACAACCAGAGGTTCAAGGGAAA |
| | | GGCCACATTGACTGTAGACAAGTCCTCCAGCACAGCCTAC |
| | | ATGGAGCTCCGCAGCCTGACATCTGAGGACACTGCAGTCT |
| | | ATTACTGTGCAAGAAGAGGATTTTTTCCTTATTACGGTAA |
| | | TAGCTACTATTACTTCGATGTCTGGGGCGCAGGGACCACG |
| | | GTCACCGTCTCCTCA |
| SEQ ID NO: 252 | HC | EVQLQQFGAELVKPGTSVKISCKASGYTFTDYNMDWVKQS |
| | | HGKSLEWIGDINPNYDITTYNQRFKGKATLTVDKSSSTAY |
| | | MELRSLTSEDTAVYYCARRGFFPYYGNSYYYFDVVVGAGT |
| | | TVTVSSASTKGPSVFPLAPSSKSTSGGTAALGCLVKDYFP |
| | | EPVTVSWNSGALTSGVHTFPAVLQSSGLYSLSSVVTVPSS |
| | | SLGTQTYICNVNHKPSNTKVDKRVEPKSCDKTHTCPPCPA |
| | | PELLGGPSVFLFPPKPKDTLMISRTPEVTCVVVDVSHEDP |
| | | EVKFNVVYVDGVEVHNAKTKPREEQYNSTYRVVSVLTVLH |
| | | QDWLNGKEYKCKVSNKALPAPIEKTISKAKGQPREPQVYT |
| | | LPPSREEMTKNQVSLTCLVKGFYPSDIAVEWESNGQPENN |
| | | YKTTPPVLDSDGSFFLYSKLTVDKSRWQQGNVFSCSVMHE |
| | | ALHNHYTQKSLSLSPGK |
| SEQ ID NO: 253 | HC DNA | GAGGTCCAGCTGCAACAGTTTGGAGCTGAGCTGGTGAAGC |
| | | CTGGGACTTCAGTGAAGATATCCTGCAAGGCTTCTGGCTA |
| | | CACATTCACTGACTACAACATGGACTGGGTGAAGCAGAGC |
| | | CATGGAAAGAGCCTTGAGTGGATTGGAGATATTAATCCTA |
| | | ACTATGATATTACTACCTACAACCAGAGGTTCAAGGGAAA |
| | | GGCCACATTGACTGTAGACAAGTCCTCCAGCACAGCCTAC |
| | | ATGGAGCTCCGCAGCCTGACATCTGAGGACACTGCAGTCT |
| | | ATTACTGTGCAAGAAGAGGATTTTTTCCTTATTACGGTAA |
| | | TAGCTACTATTACTTCGATGTCTGGGGCGCAGGGACCACG |
| | | GTCACCGTCTCCTCAGCTAGCACCAAGGGCCCAAGTGTGT |
| | | TTCCCCTGGCCCCCAGCAGCAAGTCTACTTCCGGCGGAAC |
| | | TGCTGCCCTGGGTTGCCTGGTGAAGGACTACTTCCCCGAG |
| | | CCCGTGACAGTGTCCTGGAACTCTGGGGCTCTGACTTCCG |
| | | GCGTGCACACCTTCCCCGCCGTGCTGCAGAGCAGCGGCCT |
| | | GTACAGCCTGAGCAGCGTGGTGACAGTGCCCTCCAGCTCT |
| | | CTGGGAACCCAGACCTATATCTGCAACGTGAACCACAAGC |
| | | CCAGCAACACCAAGGTGGACAAGAGAGTGGAGCCCAAGAG |
| | | CTGCGACAAGACCCACACCTGCCCCCCCTGCCCAGCTCCA |
| | | GAACTGCTGGGAGGGCCTTCCGTGTTCCTGTTCCCCCCCA |
| | | AGCCCAAGGACACCCTGATGATCAGCAGGACCCCCGAGGT |
| | | GACCTGCGTGGTGGTGGACGTGTCCCACGAGGACCCAGAG |
| | | GTGAAGTTCAACTGGTACGTGGACGGCGTGGAGGTGCACA |
| | | ACGCCAAGACCAAGCCCAGAGAGGAGCAGTACAACAGCAC |
| | | CTACAGGGTGGTGTCCGTGCTGACCGTGCTGCACCAGGAC |
| | | TGGCTGAACGGCAAAGAATACAAGTGCAAAGTCTCCAACA |
| | | AGGCCCTGCCAGCCCCAATCGAAAAGACAATCAGCAAGGC |
| | | CAAGGGCCAGCCACGGGAGCCCCAGGTGTACACCCTGCCC |
| | | CCCAGCCGGGAGGAGATGACCAAGAACCAGGTGTCCCTGA |
| | | CCTGTCTGGTGAAGGGCTTCTACCCCAGCGATATCGCCGT |
| | | GGAGTGGGAGAGCAACGGCCAGCCCGAGAACAACTACAAG |
| | | ACCACCCCCCCAGTGCTGGACAGCGACGGCAGCTTCTTCC |
| | | TGTACAGCAAGCTGACCGTGGACAAGTCCAGGTGGCAGCA |
| | | GGGCAACGTGTTCAGCTGCAGCGTGATGCACGAGGCCCTG |
| | | CACAACCACTACACCCAGAAGTCCCTGAGCCTGAGCCCCG |
| | | GCAAG |
| SEQ ID NO: 254 | LCDR1 (KABAT) | SASSSVSYMH |
| SEQ ID NO: 15 | LCDR2 (KABAT) | STSNLAS |
| SEQ ID NO: 255 | LCDR3 (KABAT) | HQWSNYPWT |
| SEQ ID NO: 17 | LCDR1 (CHOTHIA) | SSSVSY |
| SEQ ID NO: 18 | LCDR2 (CHOTHIA) | STS |
| SEQ ID NO: 256 | LCDR3 (CHOTHIA) | WSNYPW |
| SEQ ID NO: 254 | LCDR1 (COMBINED) | SASSSVSYMH |
| SEQ ID NO: 15 | LCDR2 (COMBINED) | STSNLAS |
| SEQ ID NO: 255 | LCDR3 (COMBINED) | HQWSNYPWT |
| SEQ ID NO: 20 | LCDR1 (IMGT) | SSVSY |
| SEQ ID NO: 18 | LCDR2 (IMGT) | STS |
| SEQ ID NO: 255 | LCDR3 (IMGT) | HQWSNYPWT |
| SEQ ID NO: 257 | VL | QIVLTQSPTIMSASLGEEITLTCSASSSVSYMHWYQQKSG |
| | | TSPKLLIYSTSNLASGVPSRFSGSGSGTFYSLTISSVEAE |
| | | DAADYYCHQWSNYPWTFGGGTKLEIK |
| SEQ ID NO: 258 | VL DNA | CAAATTGTTCTCACCCAGTCTCCAACAATCATGTCTGCAT |
| | | CTCTAGGGGAGGAGATCACCCTTACCTGCAGTGCCAGCTC |
| | | GAGTGTAAGTTACATGCACTGGTACCAGCAGAAGTCAGGC |
| | | ACTTCTCCCAAACTCTTGATTTATAGCACATCCAACCTGG |
| | | CTTCTGGAGTCCCTTCTCGCTTCAGTGGCAGTGGGTCTGG |
| | | GACCTTTTATTCTCTCACAATCAGCAGTGTGGAGGCTGAA |
| | | GATGCTGCCGATTATTACTGCCATCAGTGGAGTAATTATC |
| | | CATGGACGTTCGGTGGAGGCACCAAGCTGGAAATCAAA |
| SEQ ID NO: 259 | LC | QIVLTQSPTIMSASLGEEITLTCSASSSVSYMHWYQQKSG |
| | | TSPKLLIYSTSNLASGVPSRFSGSGSGTFYSLTISSVEAE |
| | | DAADYYCHQWSNYPWTFGGGTKLEIKRTVAAPSVFIFPPS |
| | | DEQLKSGTASVVCLLNNFYPREAKVQWKVDNALQSGNSQE |
| | | SVTEQDSKDSTYSLSSTLTLSKADYEKHKVYACEVTHQGL |
| | | SSPVTKSFNRGEC |
| SEQ ID NO: 260 | LC DNA | CAAATTGTTCTCACCCAGTCTCCAACAATCATGTCTGCAT |
| | | CTCTAGGGGAGGAGATCACCCTTACCTGCAGTGCCAGCTC |
| | | GAGTGTAAGTTACATGCACTGGTACCAGCAGAAGTCAGGC |
| | | ACTTCTCCCAAACTCTTGATTTATAGCACATCCAACCTGG |
| | | CTTCTGGAGTCCCTTCTCGCTTCAGTGGCAGTGGGTCTGG |
| | | GACCTTTTATTCTCTCACAATCAGCAGTGTGGAGGCTGAA |
| | | GATGCTGCCGATTATTACTGCCATCAGTGGAGTAATTATC |
| | | CATGGACGTTCGGTGGAGGCACCAAGCTGGAAATCAAACG |
| | | TACGGTGGCCGCTCCCAGCGTGTTCATCTTCCCCCCCAGC |
| | | GACGAGCAGCTGAAGAGTGGCACCGCCAGCGTGGTGTGCC |
| | | TGCTGAACAACTTCTACCCCCGGGAGGCCAAGGTGCAGTG |
| | | GAAGGTGGACAACGCCCTGCAGAGCGGCAACAGCCAGGAG |
| | | AGCGTCACCGAGCAGGACAGCAAGGACTCCACCTACAGCC |
| | | TGAGCAGCACCCTGACCCTGAGCAAGGCCGACTACGAGAA |
| | | GCATAAGGTGTACGCCTGCGAGGTGACCCACCAGGGCCTG |
| | | TCCAGCCCCGTGACCAAGAGCTTCAACAGGGGCGAGTGC |
| ANTI-HUMAN | | |
| ENTPD2 MAB20 | | |
| SEQ ID NO: 1 | HCDR1 (KABAT) | DYNMD |
| SEQ ID NO: 261 | HCDR2 (KABAT) | DINPNYDITSYNQKFKG |
| SEQ ID NO: 262 | HCDR3 (KABAT) | RGFFLYYGSSYYYFDV |
| SEQ ID NO: 4 | HCDR1 (CHOTHIA) | GYTFTDY |
| SEQ ID NO: 247 | HCDR2 (CHOTHIA) | NPNYDI |
| SEQ ID NO: 262 | HCDR3 (CHOTHIA) | RGFFLYYGSSYYYFDV |
| SEQ ID NO: 6 | HCDR1 (COMBINED) | GYTFTDYNMD |
| SEQ ID NO: 261 | HCDR2 (COMBINED) | DINPNYDITSYNQKFKG |
| SEQ ID NO: 262 | HCDR3 (COMBINED) | RGFFLYYGSSYYYFDV |
| SEQ ID NO: 7 | HCDR1 (IMGT) | GYTFTDYN |
| SEQ ID NO: 248 | HCDR2 (IMGT) | INPNYDIT |
| SEQ ID NO: 263 | HCDR3 (IMGT) | ARRGFFLYYGSSYYYFDV |
| SEQ ID NO: 264 | VH | EVQLQQFGAELVKPGASVKISCKASGYTFTDYNMDWVKQS |
| | | HGKSLEWIGDINPNYDITSYNQKFKGKATLTVDKSSSTAY |
| | | MELRSLTSEDTAVYYCARRGEFLYYGSSYYYFDVVVGAGT |
| | | TVTVSS |
| SEQ ID NO: 265 | VH DNA | GAGGTCCAGCTGCAACAGTTTGGAGCTGAGCTGGTGAAGC |
| | | CTGGGGCTTCAGTGAAGATATCCTGCAAGGCTTCTGGCTA |
| | | CACATTCACTGACTACAACATGGACTGGGTGAAGCAGAGC |
| | | CATGGAAAGAGCCTTGAGTGGATTGGAGATATTAATCCTA |
| | | ACTATGATATTACTAGCTACAACCAGAAGTTCAAGGGAAA |
| | | GGCCACATTGACTGTAGACAAGTCCTCCAGCACAGCCTAC |
| | | ATGGAGCTCCGCAGCCTGACATCTGAGGACACTGCAGTCT |
| | | ATTACTGTGCAAGAAGAGGGTTTTTTCTTTACTACGGTAG |
| | | TAGCTACTATTACTTCGATGTCTGGGGCGCAGGGACCACG |
| | | GTCACCGTCTCCTCA |
| SEQ ID NO: 266 | HC | EVQLQQFGAELVKPGASVKISCKASGYTFTDYNMDWVKQS |
| | | HGKSLEWIGDINPNYDITSYNQKFKGKATLTVDKSSSTAY |
| | | MELRSLTSEDTAVYYCARRGFFLYYGSSYYYFDVVVGAGT |
| | | TVTVSSASTKGPSVFPLAPSSKSTSGGTAALGCLVKDYFP |
| | | EPVTVSWNSGALTSGVHTFPAVLQSSGLYSLSSVVTVPSS |
| | | SLGTQTYICNVNHKPSNTKVDKRVEPKSCDKTHTCPPCPA |
| | | PELLGGPSVFLFPPKPKDTLMISRTPEVTCVVVDVSHEDP |
| | | EVKFNVVYVDGVEVHNAKTKPREEQYNSTYRVVSVLTVLH |
| | | QDWLNGKEYKCKVSNKALPAPIEKTISKAKGQPREPQVYT |
| | | LPPSREEMTKNQVSLTCLVKGFYPSDIAVEWESNGQPENN |
| | | YKTTPPVLDSDGSFFLYSKLTVDKSRWQQGNVFSCSVMHE |
| | | ALHNHYTQKSLSLSPGK |
| SEQ ID NO: 267 | HC DNA | GAGGTCCAGCTGCAACAGTTTGGAGCTGAGCTGGTGAAGC |
| | | CTGGGGCTTCAGTGAAGATATCCTGCAAGGCTTCTGGCTA |
| | | CACATTCACTGACTACAACATGGACTGGGTGAAGCAGAGC |
| | | CATGGAAAGAGCCTTGAGTGGATTGGAGATATTAATCCTA |
| | | ACTATGATATTACTAGCTACAACCAGAAGTTCAAGGGAAA |
| | | GGCCACATTGACTGTAGACAAGTCCTCCAGCACAGCCTAC |
| | | ATGGAGCTCCGCAGCCTGACATCTGAGGACACTGCAGTCT |
| | | ATTACTGTGCAAGAAGAGGGTTTTTTCTTTACTACGGTAG |
| | | TAGCTACTATTACTTCGATGTCTGGGGCGCAGGGACCACG |
| | | GTCACCGTCTCCTCAGCTAGCACCAAGGGCCCAAGTGTGT |
| | | TTCCCCTGGCCCCCAGCAGCAAGTCTACTTCCGGCGGAAC |
| | | TGCTGCCCTGGGTTGCCTGGTGAAGGACTACTTCCCCGAG |
| | | CCCGTGACAGTGTCCTGGAACTCTGGGGCTCTGACTTCCG |
| | | GCGTGCACACCTTCCCCGCCGTGCTGCAGAGCAGCGGCCT |
| | | GTACAGCCTGAGCAGCGTGGTGACAGTGCCCTCCAGCTCT |
| | | CTGGGAACCCAGACCTATATCTGCAACGTGAACCACAAGC |
| | | CCAGCAACACCAAGGTGGACAAGAGAGTGGAGCCCAAGAG |
| | | CTGCGACAAGACCCACACCTGCCCCCCCTGCCCAGCTCCA |
| | | GAACTGCTGGGAGGGCCTTCCGTGTTCCTGTTCCCCCCCA |
| | | AGCCCAAGGACACCCTGATGATCAGCAGGACCCCCGAGGT |
| | | GACCTGCGTGGTGGTGGACGTGTCCCACGAGGACCCAGAG |
| | | GTGAAGTTCAACTGGTACGTGGACGGCGTGGAGGTGCACA |
| | | ACGCCAAGACCAAGCCCAGAGAGGAGCAGTACAACAGCAC |
| | | CTACAGGGTGGTGTCCGTGCTGACCGTGCTGCACCAGGAC |
| | | TGGCTGAACGGCAAAGAATACAAGTGCAAAGTCTCCAACA |
| | | AGGCCCTGCCAGCCCCAATCGAAAAGACAATCAGCAAGGC |
| | | CAAGGGCCAGCCACGGGAGCCCCAGGTGTACACCCTGCCC |
| | | CCCAGCCGGGAGGAGATGACCAAGAACCAGGTGTCCCTGA |
| | | CCTGTCTGGTGAAGGGCTTCTACCCCAGCGATATCGCCGT |
| | | GGAGTGGGAGAGCAACGGCCAGCCCGAGAACAACTACAAG |
| | | ACCACCCCCCCAGTGCTGGACAGCGACGGCAGCTTCTTCC |
| | | TGTACAGCAAGCTGACCGTGGACAAGTCCAGGTGGCAGCA |
| | | GGGCAACGTGTTCAGCTGCAGCGTGATGCACGAGGCCCTG |
| | | CACAACCACTACACCCAGAAGTCCCTGAGCCTGAGCCCCG |
| | | GCAAG |
| SEQ ID NO: 254 | LCDR1 (KABAT) | SASSSVSYMH |
| SEQ ID NO: 15 | LCDR2 (KABAT) | STSNLAS |
| SEQ ID NO: 16 | LCDR3 (KABAT) | HQWSSYPWT |
| SEQ ID NO: 17 | LCDR1 (CHOTHIA) | SSSVSY |
| SEQ ID NO: 18 | LCDR2 (CHOTHIA) | STS |
| SEQ ID NO: 19 | LCDR3 (CHOTHIA) | WSSYPW |
| SEQ ID NO: 254 | LCDR1 (COMBINED) | SASSSVSYMH |
| SEQ ID NO: 15 | LCDR2 (COMBINED) | STSNLAS |
| SEQ ID NO: 16 | LCDR3 (COMBINED) | HQWSSYPWT |
| SEQ ID NO: 20 | LCDR1 (IMGT) | SSVSY |
| SEQ ID NO: 18 | LCDR2 (IMGT) | STS |
| SEQ ID NO: 16 | LCDR3 (IMGT) | HQWSSYPWT |
| SEQ ID NO: 268 | VL | QIVLTQSPAIMSASLGEEITLTCSASSSVSYMHWYQQKSG |
| | | TSPKLLIYSTSNLASGVPSRFSGSGSGTFYSLTISSVEAE |
| | | DAADYYCHQWSSYPWTFGGGTKLEIK |
| SEQ ID NO: 269 | VL DNA | CAAATTGTTCTCACCCAGTCTCCAGCAATCATGTCTGCAT |
| | | CTCTAGGGGAGGAGATCACCCTAACCTGCAGTGCCAGCTC |
| | | GAGTGTAAGTTACATGCACTGGTACCAGCAGAAGTCAGGC |
| | | ACTTCTCCCAAACTCTTGATTTATAGCACATCCAACCTGG |
| | | CTTCTGGAGTCCCTTCTCGCTTCAGTGGCAGTGGGTCTGG |
| | | GACCTTTTATTCTCTCACAATCAGCAGTGTGGAGGCTGAA |
| | | GATGCTGCCGATTATTACTGCCATCAGTGGAGTAGTTATC |
| | | CATGGACGTTCGGTGGAGGCACCAAGCTGGAAATCAAA |
| SEQ ID NO: 270 | LC | QIVLTQSPAIMSASLGEEITLTCSASSSVSYMHWYQQKSG |
| | | TSPKLLIYSTSNLASGVPSRFSGSGSGTFYSLTISSVEAE |
| | | DAADYYCHQWSSYPWTFGGGTKLEIKRTVAAPSVFIFPPS |
| | | DEQLKSGTASVVCLLNNFYPREAKVQWKVDNALQSGNSQE |
| | | SVTEQDSKDSTYSLSSTLTLSKADYEKHKVYACEVTHQGL |
| | | SSPVTKSFNRGEC |
| SEQ ID NO: 271 | LC DNA | CAAATTGTTCTCACCCAGTCTCCAGCAATCATGTCTGCAT |
| | | CTCTAGGGGAGGAGATCACCCTAACCTGCAGTGCCAGCTC |
| | | GAGTGTAAGTTACATGCACTGGTACCAGCAGAAGTCAGGC |
| | | ACTTCTCCCAAACTCTTGATTTATAGCACATCCAACCTGG |
| | | CTTCTGGAGTCCCTTCTCGCTTCAGTGGCAGTGGGTCTGG |
| | | GACCTTTTATTCTCTCACAATCAGCAGTGTGGAGGCTGAA |
| | | GATGCTGCCGATTATTACTGCCATCAGTGGAGTAGTTATC |
| | | CATGGACGTTCGGTGGAGGCACCAAGCTGGAAATCAAACG |
| | | TACGGTGGCCGCTCCCAGCGTGTTCATCTTCCCCCCCAGC |
| | | GACGAGCAGCTGAAGAGTGGCACCGCCAGCGTGGTGTGCC |
| | | TGCTGAACAACTTCTACCCCCGGGAGGCCAAGGTGCAGTG |
| | | GAAGGTGGACAACGCCCTGCAGAGCGGCAACAGCCAGGAG |
| | | AGCGTCACCGAGCAGGACAGCAAGGACTCCACCTACAGCC |
| | | TGAGCAGCACCCTGACCCTGAGCAAGGCCGACTACGAGAA |
| | | GCATAAGGTGTACGCCTGCGAGGTGACCCACCAGGGCCTG |
| | | TCCAGCCCCGTGACCAAGAGCTTCAACAGGGGCGAGTGC |
| ANTI-HUMAN | | |
| ENTPD2 MAB21 | | |
| SEQ ID NO: 272 | HCDR1 (KABAT) | EYTMH |
| SEQ ID NO: 273 | HCDR2 (KABAT) | GINPNNGITTYNQKFKG |
| SEQ ID NO: 274 | HCDR3 (KABAT) | RGFPIYYYGTSLYYFDY |
| SEQ ID NO: 275 | HCDR1 (CHOTHIA) | GYTFTEY |
| SEQ ID NO: 276 | HCDR2 (CHOTHIA) | NPNNGI |
| SEQ ID NO: 274 | HCDR3 (CHOTHIA) | RGFPIYYYGTSLYYFDY |
| SEQ ID NO: 277 | HCDR1 (COMBINED) | GYTFTEYTMH |
| SEQ ID NO: 273 | HCDR2 (COMBINED) | GINPNNGITTYNQKFKG |
| SEQ ID NO: 274 | HCDR3 (COMBINED) | RGFPIYYYGTSLYYFDY |
| SEQ ID NO: 278 | HCDR1 (IMGT) | GYTFTEYT |
| SEQ ID NO: 279 | HCDR2 (IMGT) | INPNNGIT |
| SEQ ID NO: 280 | HCDR3 (IMGT) | ARRGFPIYYYGTSLYYFDY |
| SEQ ID NO: 281 | VH | EVQLQQSGPELVKPGASVKISCKTSGYTFTEYTMHWVKQS |
| | | HGKSLEWIGGINPNNGITTYNQKFKGKATLTVDKSSSTAY |
| | | MDLRSLTSEGSAVYYCARRGFPIYYYGTSLYYFDYWGQGT |
| | | TLTVSS |
| SEQ ID NO: 282 | VH DNA | GAGGTCCAGCTGCAACAGTCTGGACCTGAGCTGGTGAAGC |
| | | CTGGGGCTTCAGTGAAGATATCCTGCAAGACTTCTGGATA |
| | | CACATTCACTGAATACACCATGCACTGGGTGAAGCAGAGC |
| | | CATGGAAAGAGCCTTGAGTGGATTGGAGGTATTAATCCTA |
| | | ACAATGGTATTACTACTTACAACCAGAAGTTCAAGGGCAA |
| | | GGCCACATTGACTGTAGACAAGTCCTCCAGCACAGCCTAC |
| | | ATGGACCTCCGCAGCCTGACATCTGAGGGTTCTGCAGTCT |
| | | ATTACTGTGCAAGAAGGGGATTCCCTATTTATTACTACGG |
| | | TACTAGCCTCTACTACTTTGACTACTGGGGCCAAGGCACC |
| | | ACTCTCACAGTCTCCTCA |
| SEQ ID NO: 283 | HC | EVQLQQSGPELVKPGASVKISCKTSGYTFTEYTMHWVKQS |
| | | HGKSLEWIGGINPNNGITTYNQKFKGKATLTVDKSSSTAY |
| | | MDLRSLTSEGSAVYYCARRGFPIYYYGTSLYYFDYWGQGT |
| | | TLTVSSASTKGPSVFPLAPSSKSTSGGTAALGCLVKDYFP |
| | | EPVTVSWNSGALTSGVHTFPAVLQSSGLYSLSSVVTVPSS |
| | | SLGTQTYICNVNHKPSNTKVDKRVEPKSCDKTHTCPPCPA |
| | | PELLGGPSVFLFPPKPKDTLMISRTPEVTCVVVDVSHEDP |
| | | EVKFNWYVDGVEVHNAKTKPREEQYNSTYRVVSVLTVLHQ |
| | | DWLNGKEYKCKVSNKALPAPIEKTISKAKGQPREPQVYTL |
| | | PPSREEMTKNQVSLTCLVKGFYPSDIAVEWESNGQPENNY |
| | | KTTPPVLDSDGSFFLYSKLTVDKSRWQQGNVFSCSVMHEA |
| | | LHNHYTQKSLSLSPGK |
| SEQ ID NO: 284 | HC DNA | GAGGTCCAGCTGCAACAGTCTGGACCTGAGCTGGTGAAGC |
| | | CTGGGGCTTCAGTGAAGATATCCTGCAAGACTTCTGGATA |
| | | CACATTCACTGAATACACCATGCACTGGGTGAAGCAGAGC |
| | | CATGGAAAGAGCCTTGAGTGGATTGGAGGTATTAATCCTA |
| | | ACAATGGTATTACTACTTACAACCAGAAGTTCAAGGGCAA |
| | | GGCCACATTGACTGTAGACAAGTCCTCCAGCACAGCCTAC |
| | | ATGGACCTCCGCAGCCTGACATCTGAGGGTTCTGCAGTCT |
| | | ATTACTGTGCAAGAAGGGGATTCCCTATTTATTACTACGG |
| | | TACTAGCCTCTACTACTTTGACTACTGGGGCCAAGGCACC |
| | | ACTCTCACAGTCTCCTCAGCTAGCACCAAGGGCCCAAGTG |
| | | TGTTTCCCCTGGCCCCCAGCAGCAAGTCTACTTCCGGCGG |
| | | AACTGCTGCCCTGGGTTGCCTGGTGAAGGACTACTTCCCC |
| | | GAGCCCGTGACAGTGTCCTGGAACTCTGGGGCTCTGACTT |
| | | CCGGCGTGCACACCTTCCCCGCCGTGCTGCAGAGCAGCGG |
| | | CCTGTACAGCCTGAGCAGCGTGGTGACAGTGCCCTCCAGC |
| | | TCTCTGGGAACCCAGACCTATATCTGCAACGTGAACCACA |
| | | AGCCCAGCAACACCAAGGTGGACAAGAGAGTGGAGCCCAA |
| | | GAGCTGCGACAAGACCCACACCTGCCCCCCCTGCCCAGCT |
| | | CCAGAACTGCTGGGAGGGCCTTCCGTGTTCCTGTTCCCCC |
| | | CCAAGCCCAAGGACACCCTGATGATCAGCAGGACCCCCGA |
| | | GGTGACCTGCGTGGTGGTGGACGTGTCCCACGAGGACCCA |
| | | GAGGTGAAGTTCAACTGGTACGTGGACGGCGTGGAGGTGC |
| | | ACAACGCCAAGACCAAGCCCAGAGAGGAGCAGTACAACAG |
| | | CACCTACAGGGTGGTGTCCGTGCTGACCGTGCTGCACCAG |
| | | GACTGGCTGAACGGCAAAGAATACAAGTGCAAAGTCTCCA |
| | | ACAAGGCCCTGCCAGCCCCAATCGAAAAGACAATCAGCAA |
| | | GGCCAAGGGCCAGCCACGGGAGCCCCAGGTGTACACCCTG |
| | | CCCCCCAGCCGGGAGGAGATGACCAAGAACCAGGTGTCCC |
| | | TGACCTGTCTGGTGAAGGGCTTCTACCCCAGCGATATCGC |
| | | CGTGGAGTGGGAGAGCAACGGCCAGCCCGAGAACAACTAC |
| | | AAGACCACCCCCCCAGTGCTGGACAGCGACGGCAGCTTCT |
| | | TCCTGTACAGCAAGCTGACCGTGGACAAGTCCAGGTGGCA |
| | | GCAGGGCAACGTGTTCAGCTGCAGCGTGATGCACGAGGCC |
| | | CTGCACAACCACTACACCCAGAAGTCCCTGAGCCTGAGCC |
| | | CCGGCAAG |
| SEQ ID NO: 254 | LCDR1 (KABAT) | SASSSVSYMH |
| SEQ ID NO: 285 | LCDR2 (KABAT) | TTSNLAS |
| SEQ ID NO: 16 | LCDR3 (KABAT) | HQWSSYPWT |
| SEQ ID NO: 17 | LCDR1 (CHOTHIA) | SSSVSY |
| SEQ ID NO: 286 | LCDR2 (CHOTHIA) | TTS |
| SEQ ID NO: 19 | LCDR3 (CHOTHIA) | WSSYPW |
| SEQ ID NO: 254 | LCDR1 (COMBINED) | SASSSVSYMH |
| SEQ ID NO: 285 | LCDR2 (COMBINED) | TTSNLAS |
| SEQ ID NO: 16 | LCDR3 (COMBINED) | HQWSSYPWT |
| SEQ ID NO: 20 | LCDR1 (IMGT) | SSVSY |
| SEQ ID NO: 286 | LCDR2 (IMGT) | TTS |
| SEQ ID NO: 16 | LCDR3 (IMGT) | HQWSSYPWT |
| SEQ ID NO: 287 | VL | QIVLTQSPAIMSASLGEEITLTCSASSSVSYMHWYQQRSG |
| | | TSPKLLIYTTSNLASGVPSRFSGSGSGTFYSLTISSVEAE |
| | | DAADYYCHQWSSYPWTFGGGTKLEIK |
| SEQ ID NO: 288 | VL DNA | CAAATTGTTCTCACCCAGTCTCCAGCAATCATGTCTGCAT |
| | | CTCTAGGGGAGGAGATCACCCTAACCTGCAGTGCCAGCTC |
| | | GAGTGTAAGTTACATGCACTGGTACCAGCAGAGGTCAGGC |
| | | ACTTCTCCCAAACTCTTGATTTATACCACATCCAACCTGG |
| | | CTTCTGGAGTCCCTTCTCGCTTCAGTGGCAGTGGGTCTGG |
| | | GACCTTTTATTCTCTCACAATCAGCAGTGTGGAGGCTGAA |
| | | GATGCTGCCGATTATTACTGCCATCAGTGGAGTAGTTATC |
| | | CGTGGACGTTCGGTGGAGGCACCAAGCTGGAAATCAAA |
| SEQ ID NO: 289 | LC | QIVLTQSPAIMSASLGEEITLTCSASSSVSYMHWYQQRSG |
| | | TSPKLLIYTTSNLASGVPSRFSGSGSGTFYSLTISSVEAE |
| | | DAADYYCHQWSSYPWTFGGGTKLEIKRTVAAPSVFIFPPS |
| | | DEQLKSGTASVVCLLNNFYPREAKVQWKVDNALQSGNSQE |
| | | SVTEQDSKDSTYSLSSTLTLSKADYEKHKVYACEVTHQGL |
| | | SSPVTKSFNRGEC |
| SEQ ID NO: 290 | LC DNA | CAAATTGTTCTCACCCAGTCTCCAGCAATCATGTCTGCAT |
| | | CTCTAGGGGAGGAGATCACCCTAACCTGCAGTGCCAGCTC |
| | | GAGTGTAAGTTACATGCACTGGTACCAGCAGAGGTCAGGC |
| | | ACTTCTCCCAAACTCTTGATTTATACCACATCCAACCTGG |
| | | CTTCTGGAGTCCCTTCTCGCTTCAGTGGCAGTGGGTCTGG |
| | | GACCTTTTATTCTCTCACAATCAGCAGTGTGGAGGCTGAA |
| | | GATGCTGCCGATTATTACTGCCATCAGTGGAGTAGTTATC |
| | | CGTGGACGTTCGGTGGAGGCACCAAGCTGGAAATCAAACG |
| | | TACGGTGGCCGCTCCCAGCGTGTTCATCTTCCCCCCCAGC |
| | | GACGAGCAGCTGAAGAGTGGCACCGCCAGCGTGGTGTGCC |
| | | TGCTGAACAACTTCTACCCCCGGGAGGCCAAGGTGCAGTG |
| | | GAAGGTGGACAACGCCCTGCAGAGCGGCAACAGCCAGGAG |
| | | AGCGTCACCGAGCAGGACAGCAAGGACTCCACCTACAGCC |
| | | TGAGCAGCACCCTGACCCTGAGCAAGGCCGACTACGAGAA |
| | | GCATAAGGTGTACGCCTGCGAGGTGACCCACCAGGGCCTG |
| | | TCCAGCCCCGTGACCAAGAGCTTCAACAGGGGCGAGTGC |
| ANTI-HUMAN | | |
| ENTPD2 FAB22 | | |
| SEQ ID NO: 37 | HCDR1 (Kabat) | SGYYWN |
| SEQ ID NO: 220 | HCDR2 (Kabat) | YISYDGDNNYNPSLKN |
| SEQ ID NO: 221 | HCDR3 (Kabat) | GYYRYGLSYYYVMDY |
| SEQ ID NO: 40 | HCDR1 (Chothia) | GYSITSGY |
| SEQ ID NO: 222 | HCDR2 (Chothia) | SYDGD |
| SEQ ID NO: 221 | HCDR3 (Chothia) | GYYRYGLSYYYVMDY |
| SEQ ID NO: 42 | HCDR1 (Combined) | GYSITSGYYWN |
| SEQ ID NO: 220 | HCDR2 (Combined) | YISYDGDNNYNPSLKN |
| SEQ ID NO: 221 | HCDR3 (Combined) | GYYRYGLSYYYVMDY |
| SEQ ID NO: 43 | HCDR1 (IMGT) | GYSITSGYY |
| SEQ ID NO: 223 | HCDR2 (IMGT) | ISYDGDN |
| SEQ ID NO: 224 | HCDR3 (IMGT) | AGGYYRYGLSYYYVMDY |
| SEQ ID NO: 328 | VH | EVKLEQSGPGLVKPSQSLSLTCSVTGYSITSGYYWNWIRQ |
| | | FPGNKLEWMSYISYDGDNNYNPSLKNRISITRDTSKNQFF |
| | | LKLSSVTTEDTATYYCAGGYYRYGLSYYYVMDYWGQGTSV |
| | | TVSA |
| SEQ ID NO: 329 | VH DNA | GAAGTGAAGCTGGAGCAGTCAGGACCTGGCCTCGTGAAAC |
| | | CTTCTCAGTCTCTGTCTCTCACCTGCTCTGTCACTGGCTA |
| | | CTCCATCACCAGTGGTTATTACTGGAACTGGATCCGGCAG |
| | | TTTCCAGGAAACAAACTGGAATGGATGAGCTACATAAGCT |
| | | ACGACGGTGACAATAACTACAACCCATCTCTCAAAAATCG |
| | | AATCTCCATCACTCGTGACACATCTAAGAACCAGTTTTTC |
| | | CTGAAGTTGAGTTCTGTGACTACTGAGGACACAGCTACAT |
| | | ATTACTGTGCAGGAGGCTACTATAGGTACGGCCTGTCGTA |
| | | TTACTATGTTATGGACTACTGGGGTCAAGGAACCTCAGTC |
| | | ACAGTCTCCGCA |
| SEQ ID NO: 330 | HC | EVKLEQSGPGLVKPSQSLSLTCSVTGYSITSGYYWNWIRQ |
| | | FPGNKLEWMSYISYDGDNNYNPSLKNRISITRDTSKNQFF |
| | | LKLSSVTTEDTATYYCAGGYYRYGLSYYYVMDYWGQGTSV |
| | | TVSAASTKGPSVFPLAPSSKSTSGGTAALGCLVKDYFPEP |
| | | VTVSWNSGALTSGVHTFPAVLQSSGLYSLSSVVTVPSSSL |
| | | GTQTYICNVNHKPSNTKVDKRVEPKSC |
| SEQ ID NO: 331 | HC DNA | GAAGTGAAGCTGGAGCAGTCAGGACCTGGCCTCGTGAAAC |
| | | CTTCTCAGTCTCTGTCTCTCACCTGCTCTGTCACTGGCTA |
| | | CTCCATCACCAGTGGTTATTACTGGAACTGGATCCGGCAG |
| | | TTTCCAGGAAACAAACTGGAATGGATGAGCTACATAAGCT |
| | | ACGACGGTGACAATAACTACAACCCATCTCTCAAAAATCG |
| | | AATCTCCATCACTCGTGACACATCTAAGAACCAGTTTTTC |
| | | CTGAAGTTGAGTTCTGTGACTACTGAGGACACAGCTACAT |
| | | ATTACTGTGCAGGAGGCTACTATAGGTACGGCCTGTCGTA |
| | | TTACTATGTTATGGACTACTGGGGTCAAGGAACCTCAGTC |
| | | ACAGTCTCCGCAgctagcaccaagggcccaagtgtgtttc |
| | | ccctggcccccagcagcaagtctacttccggcggaactgc |
| | | tgccctgggttgcctggtgaaggactacttccccgagccc |
| | | gtgacagtgtcctggaactctggggctctgacttccggcg |
| | | tgcacaccttccccgccgtgctgcagagcagcggcctgta |
| | | cagcctgagcagcgtggtgacagtgccctccagctctctg |
| | | ggaacccagacctatatctgcaacgtgaaccacaagccca |
| | | gcaacaccaaggtggacaagagagtggagcccaagagctg |
| | | c |
| SEQ ID NO: 61 | LCDR1 (Kabat) | KASQSVDYDGNSYMN |
| SEQ ID NO: 51 | LCDR2 (Kabat) | AASNLES |
| SEQ ID NO: 52 | LCDR3 (Kabat) | QQSNEDPPT |
| SEQ ID NO: 62 | LCDR1 (Chothia) | SQSVDYDGNSY |
| SEQ ID NO: 54 | LCDR2 (Chothia) | AAS |
| SEQ ID NO: 55 | LCDR3 (Chothia) | SNEDPP |
| SEQ ID NO: 61 | LCDR1 (Combined) | KASQSVDYDGNSYMN |
| SEQ ID NO: 51 | LCDR2 (Combined) | AASNLES |
| SEQ ID NO: 52 | LCDR3 (Combined) | QQSNEDPPT |
| SEQ ID NO: 63 | LCDR1 (IMGT) | QSVDYDGNSY |
| SEQ ID NO: 54 | LCDR2 (IMGT) | AAS |
| SEQ ID NO: 52 | LCDR3 (IMGT) | QQSNEDPPT |
| SEQ ID NO: 332 | VL | DIKMTQSPASLAVSLGQRATISCKASQSVDYDGNSYMNWY |
| | | QQKPGQPPKLLIYAASNLESGIPARFSGSGSGTDFTLNIF |
| | | IPVEEEDAATYYCQQSNEDPPTFGGGTKLEK |
| SEQ ID NO: 333 | VL DNA | GATATTAAGATGACCCAATCTCCAGCCTCTTTGGCTGTGT |
| | | CTCTAGGGCAGAGGGCCACCATCTCCTGCAAGGCCAGCCA |
| | | AAGTGTTGATTATGATGGTAATAGTTATATGAACTGGTAC |
| | | CAACAGAAACCAGGACAGCCACCCAAACTCCTCATCTATG |
| | | CTGCATCCAATCTAGAATCTGGGATCCCAGCCAGGTTTAG |
| | | TGGCAGTGGGTCTGGGACAGACTTCACCCTCAACATCCAT |
| | | CCTGTGGAGGAGGAGGATGCTGCAACCTATTACTGTCAGC |
| | | AAAGTAATGAGGATCCTCCGACGTTCGGTGGAGGCACCAA |
| | | GCTGGAACTCAAA |
| SEQ ID NO: 334 | LC | DIKMTQSPASLAVSLGQRATISCKASQSVDYDGNSYMNWY |
| | | QQKPGQPPKLLIYAASNLESGIPARFSGSGSGTDFTLNIF |
| | | IPVEEEDAATYYCQQSNEDPPTFGGGTKLELKRTVAAPSV |
| | | FIFPPSDEQLKSGTASVVCLLNNFYPREAKVQWKVDNALQ |
| | | SGNSQESVTEQDSKDSTYSLSSTLTLSKADYEKHKVYACE |
| | | VTHQGLSSPVTKSFNRGEC |
| SEQ ID NO: 335 | LC DNA | GATATTAAGATGACCCAATCTCCAGCCTCTTTGGCTGTGT |
| | | CTCTAGGGCAGAGGGCCACCATCTCCTGCAAGGCCAGCCA |
| | | AAGTGTTGATTATGATGGTAATAGTTATATGAACTGGTAC |
| | | CAACAGAAACCAGGACAGCCACCCAAACTCCTCATCTATG |
| | | CTGCATCCAATCTAGAATCTGGGATCCCAGCCAGGTTTAG |
| | | TGGCAGTGGGTCTGGGACAGACTTCACCCTCAACATCCAT |
| | | CCTGTGGAGGAGGAGGATGCTGCAACCTATTACTGTCAGC |
| | | AAAGTAATGAGGATCCTCCGACGTTCGGTGGAGGCACCAA |
| | | GCTGGAACTCAAAcgtacggtggccgctcccagcgtgttc |
| | | atcttcccccccagcgacgagcagctgaagagtggcaccg |
| | | ccagcgtggtgtgcctgctgaacaacttctacccccggga |
| | | ggccaaggtgcagtggaaggtggacaacgccctgcagagc |
| | | ggcaacagccaggagagcgtcaccgagcaggacagcaagg |
| | | actccacctacagcctgagcagcaccctgaccctgagcaa |
| | | ggccgactacgagaagcataaggtgtacgcctgcgaggtg |
| | | acccaccagggcctgtccagccccgtgaccaagagcttca |
| | | acaggggcgagtgc |
| ANTI-HUMAN | | |
| ENTPD2 FAB23 | | |
| SEQ ID NO: 1 | HCDR1 (KABAT) | DYNMD |
| SEQ ID NO: 2 | HCDR2 (KABAT) | DINPKYDISTYNQQFKG |
| SEQ ID NO: 3 | HCDR3 (KABAT) | RGFFLYYGINYYYFDV |
| SEQ ID NO: 4 | HCDR1 (CHOTHIA) | GYTFTDY |
| SEQ ID NO: 5 | HCDR2 (CHOTHIA) | NPKYDI |
| SEQ ID NO: 3 | HCDR3 (CHOTHIA) | RGFFLYYGINYYYFDV |
| SEQ ID NO: 6 | HCDR1 (COMBINED) | GYTFTDYNMD |
| SEQ ID NO: 2 | HCDR2 (COMBINED) | DINPKYDISTYNQQFKG |
| SEQ ID NO: 3 | HCDR3 (COMBINED) | RGFFLYYGINYYYFDV |
| SEQ ID NO: 7 | HCDR1 (IMGT) | GYTFTDYN |
| SEQ ID NO: 8 | HCDR2 (IMGT) | INPKYDIS |
| SEQ ID NO: 9 | HCDR3 (IMGT) | ARRGFFLYYGINYYYFDV |
| SEQ ID NO: 233 | VH | EVQLQQFGAELVKPGASVKISCKASGYTFTDYNMDWVKQS |
| | | HGKSLEWIGDINPKYDISTYNQQFKGKATLTVDKSSSTAY |
| | | MELRSLTSEDTAVYYCARRGFFLYYGINYYYFDVWGAGTT |
| | | VTVSS |
| SEQ ID NO: 234 | VH DNA | GAGGTCCAACTGCAACAGTTTGGAGCTGAACTGGTGAAGC |
| | | CTGGGGCTTCAGTGAAGATATCCTGCAAGGCTTCTGGCTA |
| | | CACATTCACTGACTACAACATGGACTGGGTGAAGCAGAGC |
| | | CATGGAAAGAGCCTTGAGTGGATTGGAGATATTAATCCTA |
| | | AGTATGATATTTCTACCTACAATCAGCAATTCAAGGGAAA |
| | | GGCCACATTGACTGTAGACAAGTCCTCCAGCACAGCCTAC |
| | | ATGGAGCTCCGCAGCCTGACATCTGAGGACACTGCAGTCT |
| | | ATTATTGTGCAAGAAGAGGCTTTTTTCTTTACTACGGTAT |
| | | TAACTACTATTACTTCGATGTCTGGGGCGCAGGGACCACG |
| | | GTCACCGTCTCCTCA |
| SEQ ID NO: 336 | HC | EVQLQQFGAELVKPGASVKISCKASGYTFTDYNMDWVKQS |
| | | HGKSLEWIGDINPKYDISTYNQQFKGKATLTVDKSSSTAY |
| | | MELRSLTSEDTAVYYCARRGFFLYYGINYYYFDVWGAGTT |
| | | VTVSSASTKGPSVFPLAPSSKSTSGGTAALGCLVKDYFPE |
| | | PVTVSWNSGALTSGVHTFPAVLQSSGLYSLSSVVTVPSSS |
| | | LGTQTYICNVNFIKPSNTKVDKRVEPKSC |
| SEQ ID NO: 337 | HC DNA | GAGGTCCAACTGCAACAGTTTGGAGCTGAACTGGTGAAGC |
| | | CTGGGGCTTCAGTGAAGATATCCTGCAAGGCTTCTGGCTA |
| | | CACATTCACTGACTACAACATGGACTGGGTGAAGCAGAGC |
| | | CATGGAAAGAGCCTTGAGTGGATTGGAGATATTAATCCTA |
| | | AGTATGATATTTCTACCTACAATCAGCAATTCAAGGGAAA |
| | | GGCCACATTGACTGTAGACAAGTCCTCCAGCACAGCCTAC |
| | | ATGGAGCTCCGCAGCCTGACATCTGAGGACACTGCAGTCT |
| | | ATTATTGTGCAAGAAGAGGCTTTTTTCTTTACTACGGTAT |
| | | TAACTACTATTACTTCGATGTCTGGGGCGCAGGGACCACG |
| | | GTCACCGTCTCCTCAgctagcaccaagggcccaagtgtgt |
| | | ttcccctggcccccagcagcaagtctacttccggcggaac |
| | | tgctgccctgggttgcctggtgaaggactacttccccgag |
| | | cccgtgacagtgtcctggaactctggggctctgacttccg |
| | | gcgtgcacaccttccccgccgtgctgcagagcagcggcct |
| | | gtacagcctgagcagcgtggtgacagtgccctccagctct |
| | | ctgggaacccagacctatatctgcaacgtgaaccacaagc |
| | | ccagcaacaccaaggtggacaagagagtggagcccaagag |
| | | ctgc |
| SEQ ID NO: 14 | LCDR1 (KABAT) | SASSSVSYIH |
| SEQ ID NO: 15 | LCDR2 (KABAT) | STSNLAS |
| SEQ ID NO: 16 | LCDR3 (KABAT) | HQWSSYPWT |
| SEQ ID NO: 17 | LCDR1 (CHOTHIA) | SSSVSY |
| SEQ ID NO: 18 | LCDR2 (CHOTHIA) | STS |
| SEQ ID NO: 19 | LCDR3 (CHOTHIA) | WSSYPW |
| SEQ ID NO: 14 | LCDR1 (COMBINED) | SASSSVSYIH |
| SEQ ID NO: 15 | LCDR2 (COMBINED) | STSNLAS |
| SEQ ID NO: 16 | LCDR3 (COMBINED) | HQWSSYPWT |
| SEQ ID NO: 20 | LCDR1 (IMGT) | SSVSY |
| SEQ ID NO: 18 | LCDR2 (IMGT) | STS |
| SEQ ID NO: 16 | LCDR3 (IMGT) | HQWSSYPWT |
| SEQ ID NO: 237 | VL | QIVLTQSPAIMSASLGEEITLTCSASSSVSYIHWYQQKSG |
| | | TSPTLLIYSTSNLASGVPSRFSGSGSGTFYSLTISSVEAE |
| | | DAADYYCHQWSSYPWTFGGGTKLEIK |
| SEQ ID NO: 238 | VL DNA | CAAATTGTTCTCACCCAGTCTCCAGCAATCATGTCTGCAT |
| | | CTCTAGGGGAGGAGATCACCCTAACCTGCAGTGCCAGCTC |
| | | GAGTGTAAGTTACATACACTGGTACCAGCAGAAGTCAGGC |
| | | ACTTCTCCCACACTCTTGATTTATAGCACATCCAATCTGG |
| | | CTTCTGGAGTCCCTTCTCGCTTCAGTGGCAGTGGGTCTGG |
| | | GACCTTTTATTCTCTCACAATCAGCAGTGTGGAGGCTGAA |
| | | GATGCTGCCGATTATTACTGCCATCAGTGGAGTAGTTATC |
| | | CATGGACGTTCGGTGGAGGCACCAAGCTGGAAATCAAA |
| SEQ ID NO: 239 | LC | QIVLTQSPAIMSASLGEEITLTCSASSSVSYIHWYQQKSG |
| | | TSPTLLIYSTSNLASGVPSRFSGSGSGTFYSLTISSVEAE |
| | | DAADYYCHQWSSYPWTFGGGTKLEIKRTVAAPSVFIFPPS |
| | | DEQLKSGTASVVCLLNNFYPREAKVQWKVDNALQSGNSQE |
| | | SVTEQDSKDSTYSLSSTLTLSKADYEKHKVYACEVTHQGL |
| | | SSPVTKSFNRGEC |
| SEQ ID NO: 240 | LC DNA | CAAATTGTTCTCACCCAGTCTCCAGCAATCATGTCTGCAT |
| | | CTCTAGGGGAGGAGATCACCCTAACCTGCAGTGCCAGCTC |
| | | GAGTGTAAGTTACATACACTGGTACCAGCAGAAGTCAGGC |
| | | ACTTCTCCCACACTCTTGATTTATAGCACATCCAATCTGG |
| | | CTTCTGGAGTCCCTTCTCGCTTCAGTGGCAGTGGGTCTGG |
| | | GACCTTTTATTCTCTCACAATCAGCAGTGTGGAGGCTGAA |
| | | GATGCTGCCGATTATTACTGCCATCAGTGGAGTAGTTATC |
| | | CATGGACGTTCGGTGGAGGCACCAAGCTGGAAATCAAACG |
| | | TACGGTGGCCGCTCCCAGCGTGTTCATCTTCCCCCCCAGC |
| | | GACGAGCAGCTGAAGAGTGGCACCGCCAGCGTGGTGTGCC |
| | | TGCTGAACAACTTCTACCCCCGGGAGGCCAAGGTGCAGTG |
| | | GAAGGTGGACAACGCCCTGCAGAGCGGCAACAGCCAGGAG |
| | | AGCGTCACCGAGCAGGACAGCAAGGACTCCACCTACAGCC |
| | | TGAGCAGCACCCTGACCCTGAGCAAGGCCGACTACGAGAA |
| | | GCATAAGGTGTACGCCTGCGAGGTGACCCACCAGGGCCTG |
| | | TCCAGCCCCGTGACCAAGAGCTTCAACAGGGGCGAGTGC |

[0654] In some embodiments of the combination of the invention, the anti-human ENTPD2 antibody or antibody fragment (e.g., an antigen binding fragment) comprises a VH domain having an amino acid sequence of any VH domain described in Table 1. Other suitable anti-human ENTPD2 antibodies or antibody fragments (e.g., antigen binding fragments) can include amino acids that have been mutated, yet have at least 80, 85, 90, 95, 96, 97, 98, or 99 percent identity in the VH domain with the VH regions depicted in the sequences described in Table 1. The present disclosure in certain embodiments also provides antibodies or antibody fragments (e.g., antigen binding fragments) that specifically bind to human ENTPD2, wherein the antibodies or antibody fragments (e.g., antigen binding fragments) comprise a VH CDR having an amino acid sequence of any one of the VH CDRs listed in Table 1. In particular embodiments, the combination of the invention provides antibodies or antibody fragments (e.g., antigen binding fragments) that specifically bind to human ENTPD2, comprising (or alternatively, consist of) one, two, three, four, five or more VH CDRs having an amino acid sequence of any one of the VH CDRs listed in Table 1.

[0655] In some embodiments of the combination of the invention, the anti-human ENTPD2 antibody or antibody fragment (e.g., antigen binding fragment) comprises a VL domain having an amino acid sequence of any VL domain described in Table 1. Other suitable anti-human ENTPD2 antibodies or antibody fragments (e.g., antigen binding fragments) can include amino acids that have been mutated, yet have at least 80, 85, 90, 95, 96, 97, 98, or 99 percent identity in the VL domain with the VL regions depicted in the sequences described in Table 1. The combination of the invention in certain embodiments also relates to antibodies or antibody fragments (e.g., antigen binding fragments) that specifically bind to human ENTPD2, wherein the antibodies or antibody fragments (e.g., antigen binding fragments) comprise a VL CDR having an amino acid sequence of any one of the VL CDRs listed in Table 1. In particular, the combination of the invention in some embodiments relates to antibodies or antibody fragments (e.g., antigen binding fragments) that specifically bind to human ENTPD2, which comprise (or alternatively, consist of) one, two, three or more VL CDRs having an amino acid sequence of any one of the VL CDRs listed in Table 1.

[0656] Other anti-human ENTPD2 antibodies or antibody fragments (e.g., antigen binding fragment) disclosed herein include amino acids that have been mutated, yet have at least 80, 85, 90, 95, 96, 97, 98, or 99 percent identity in the CDR regions with the CDR regions depicted in the sequences described in Table 1. In some embodiments, it includes mutant amino acid sequences wherein no more than 1, 2, 3, 4 or 5 amino acids have been mutated in the CDR regions when compared with the CDR regions depicted in the sequence described in Table 1.

[0657] Also provided herein are nucleic acid sequences that encode VH, VL, full length heavy chain, and full length light chain of antibodies and antigen binding fragments thereof that specifically bind to human ENTPD2, e.g., the nucleic acid sequences in Table 1. Such nucleic acid sequences can be optimized for expression in mammalian cells.

[0658] Other anti-human ENTPD2 antibodies disclosed herein include those where the amino acids or nucleic acids encoding the amino acids have been mutated, yet have at least 80, 85, 90 95, 96, 97, 98, or 99 percent identity to the sequences described in Table 1. In some embodiments, antibodies or antigen binding fragments thereof include mutant amino acid sequences wherein no more than 1, 2, 3, 4 or 5 amino acids have been mutated in the variable regions when compared with the variable regions depicted in the sequence described in Table 1, while retaining substantially the same therapeutic activity.

[0659] Since the anti-ENTPD2 antibodies or antigen binding fragments described herein bind to human ENTPD2, the VH, VL, full length light chain, and full length heavy chain sequences (amino acid sequences and the nucleotide sequences encoding the amino acid sequences) can be “mixed and matched” to create other ENTPD2-binding antibodies disclosed herein. Such “mixed and matched” ENTPD2-binding antibodies can be tested using binding assays known in the art (e.g., ELISAs, assays described in the Exemplification). When chains are mixed and matched, a VH sequence from a particular VH/VL pairing should be replaced with a structurally similar VH sequence. A full length heavy chain sequence from a particular full length heavy chain / full length light chain pairing should be replaced with a structurally similar full length heavy chain sequence. A VL sequence from a particular VH/VL pairing should be replaced with a structurally similar VL sequence. A full length light chain sequence from a particular full length heavy chain / full length light chain pairing should be replaced with a structurally similar full length light chain sequence.

[0660] Accordingly, in one embodiment, the combination of the invention relates to an isolated anti-ENTPD2 monoclonal antibody or antigen binding fragment thereof having: a heavy chain variable region (VH) comprising an amino acid sequence selected from any one of SEQ ID NOs: 10, 25, 33, 46, 70, 91, 115, 132, 145, 169, 225, 233, 241, 250, 264, 281, 328; and a light chain variable region (VL) comprising an amino acid sequence selected from any one of SEQ ID NOs: 21, 29, 57, 64, 74, 78, 102, 125, 156, 178, 229, 237, 257, 268, 287, 332; wherein the antibody specifically binds to human ENTPD2.

[0661] In another embodiment, the combination of the invention provides (i) an isolated anti-ENTPD2 monoclonal antibody having: a full length heavy chain (HC) comprising an amino acid sequence selected from any one of SEQ ID NOs: 12, 27, 35, 48, 72, 93, 117, 134, 147, 171, 227, 235, 243, 252, 266, 283, 330; and a full length light chain (LC) comprising an amino acid sequence selected from any one of SEQ ID NOs: 23, 31, 59, 66, 76, 80, 104, 127, 158, 180, 231, 239, 259, 270, 289, 334; or (ii) a functional protein comprising an antigen binding portion thereof.

[0662] In another embodiment, the combination of the invention relates to a human ENTPD2-binding antibody or antibody fragment thereof that comprises the heavy chain CDR1, CDR2 and CDR3 and light chain CDR1, CDR2 and CDR3 as described in Table 1, or combinations thereof The amino acid sequences of the VH CDR1s of the antibodies are shown in SEQ ID NOs: 1, 4, 6, 7, 37, 40, 42, 43, 82, 85, 87, 88, 106, 109, 111, 112, 136, 139, 141, 142, 160, 163, 165, 166, 185, 187, 188, 206, 207, 208, 213, 214, 215, 272, 275, 277. The amino acid sequences of the VH CDR2s of the antibodies and are shown in SEQ ID NOs: 2, 5, 8, 38, 41, 44, 83, 86, 89, 107, 110, 113, 129, 130, 131, 137, 140, 143, 161, 164, 167, 186, 189, 220, 222, 223, 245, 247, 248, 261, 273, 276, 279. The amino acid sequences of the VH CDR3s of the antibodies are shown in SEQ ID NO: 3, 39, 68, 84, 108, 138, 162, 221, 246, 262, 277, 274, 9, 45, 69, 90, 114, 144, 168, 190, 224, 249, 263, 274, 280. The amino acid sequences of the VL CDR1s of the antibodies are shown in SEQ ID NOs: 14, 17, 20, 50, 53, 56, 61, 62, 63, 95, 98, 101, 119, 122, 124, 149, 152, 155, 173, 175, 177, 198, 201, 254. The amino acid sequences of the VL CDR2s of the antibodies are shown in SEQ ID NOs: 15, 18, 51, 54, 96, 99, 120, 150, 153, 199, 285, 286. The amino acid sequences of the VL CDR3s of the antibodies are shown in SEQ ID NOs: 16, 19, 52, 55, 97, 100, 121, 123, 151, 154, 174, 176, 200, 255, 256.

[0663] Given that each of the antibodies binds human ENTPD2 and that antigen-binding specificity is provided primarily by the CDR1, CDR2 and CDR3 regions, the VH CDR1, CDR2 and CDR3 sequences and VL CDR1, CDR2 and CDR3 sequences can be “mixed and matched” (i.e., CDRs from different antibodies can be mixed and matched), although each antibody must contain a VH CDR1, CDR2 and CDR3 and a VL CDR1, CDR2 and CDR3 to create other human ENTPD2-binding antibodies disclosed herein. Such “mixed and matched” ENTPD2-binding antibodies can be tested using the binding assays known in the art and those described in the Examples (e.g., ELISAs). When VH CDR sequences are mixed and matched, the CDR1, CDR2 and/or CDR3 sequence from a particular VH sequence should be replaced with a structurally similar CDR sequence(s). Likewise, when VL CDR sequences are mixed and matched, the CDR1, CDR2 and/or CDR3 sequence from a particular VL sequence should be replaced with a structurally similar CDR sequence(s). It will be readily apparent to the ordinarily skilled artisan that novel VH and VL sequences can be created by substituting one or more VH and/or VL CDR region sequences with structurally similar sequences from CDR sequences shown herein for monoclonal antibodies of the present disclosure.

[0664] In some embodiments of the combination of the invention the anti-ENTPD2 antibody or antigen binding fragment thereof is an isolated monoclonal antibody or antigen binding region thereof comprising a heavy chain CDR1 comprising an amino acid sequence selected from the group consisting of SEQ ID NOs: 1, 4, 6, 7, 37, 40, 42, 43, 82, 85, 87, 88, 106, 109, 111, 112, 136, 139, 141, 142, 160, 163, 165, 166, 182, 187, 188, 206, 207, 208, 213, 214, 215, 272, 275, 277; a heavy chain CDR2 comprising an amino acid sequence selected from the group consisting of SEQ ID NOs: 2, 5, 8, 38, 41, 44, 83, 86, 89, 107, 110, 113, 129, 130, 131, 137, 140, 143, 161, 164, 167, 183, 189, 220, 222, 223, 245, 247, 248, 261, 273, 276; a heavy chain CDR3 comprising an amino acid sequence selected from the group consisting of SEQ ID NO: 3, 39, 68, 84, 108, 138, 162, 221, 246, 262, 277, 274, 9, 45, 69, 90, 114, 144, 168, 190, 224, 249, 263, 274, 280; a light chain CDR1 comprising an amino acid sequence selected from the group consisting of SEQ ID NOs: 14, 17, 20, 50, 53, 56, 61, 62, 63, 95, 98, 101, 119, 122, 124, 149, 152, 155, 173, 175, 177, 195, 201, 254; a light chain CDR2 comprising an amino acid sequence selected from the group consisting of SEQ ID NOs: 15, 18, 51, 54, 96, 99, 120, 150, 153, 196, 285, 286; and a light chain CDR3 comprising an amino acid sequence selected from the group consisting of SEQ ID NOs: 16, 19, 52, 55, 97, 100, 121, 123, 151, 154, 174, 176, 197, 255, 256; wherein the antibody specifically binds human ENTPD2.

[0665] In certain embodiments, an antibody that specifically binds to human ENTPD2 is an antibody or antibody fragment (e.g., antigen binding fragment) that is described in Table 1.

[0666] In some embodiments, the antibody or antigen binding region thereof that specifically binds to human ENTPD2 comprises a heavy chain complementary determining region 1 (HCDR1) comprising the amino acid sequence of SEQ ID NO: 1, 4, 6 or 7; a heavy chain complementary determining region 2 (HCDR2) comprising the amino acid sequence of SEQ ID NO: 2, 5 or 8; a heavy chain complementary determining region 3 (HCDR3) comprising the amino acid sequence of SEQ ID NO: 3 or 9; a light chain complementary determining region 1 (LCDR1) comprising the amino acid sequence of SEQ ID NO: 14, 17, or 20; a light chain complementary determining region 2 (LCDR2) comprising the amino acid sequence of SEQ ID NO:15 or 18; and a light chain complementary determining region 3 (LCDR3) comprising the amino acid sequence of SEQ ID NO: 16 or 19.

[0667] In some embodiments, the antibody or antigen binding region thereof that specifically binds to human ENTPD2 comprises an HCDR1 comprising the amino acid sequence of SEQ ID NO: 1; an HCDR2 comprising the amino acid sequence of SEQ ID NO: 2; an HCDR3 comprising the amino acid sequence of SEQ ID NO: 3; an LCDR1 comprising the amino acid sequence of SEQ ID NO: 14; an LCDR2 comprising the amino acid sequence of SEQ ID NO: 15; and an LCDR3 comprising the amino acid sequence of SEQ ID NO: 16.

[0668] In some embodiments, the antibody or antigen binding region thereof that specifically binds to human ENTPD2 comprises an HCDR1 comprising the amino acid sequence of SEQ ID NO: 4; an HCDR2 comprising the amino acid sequence of SEQ ID NO: 5; an HCDR3 comprising the amino acid sequence of SEQ ID NO: 3; an LCDR1 comprising the amino acid sequence of SEQ ID NO: 17; an LCDR2 comprising the amino acid sequence of SEQ ID NO: 18; and an LCDR3 comprising the amino acid sequence of SEQ ID NO: 19.

[0669] In some embodiments, the antibody or antigen binding region thereof that specifically binds to human ENTPD2 comprises an HCDR1 comprising the amino acid sequence of SEQ ID NO: 6; an HCDR2 comprising the amino acid sequence of SEQ ID NO: 2; an HCDR3 comprising the amino acid sequence of SEQ ID NO: 3; an LCDR1 comprising the amino acid sequence of SEQ ID NO: 14; an LCDR2 comprising the amino acid sequence of SEQ ID NO: 15; and an LCDR3 comprising the amino acid sequence of SEQ ID NO: 16.

[0670] In some embodiments, the antibody or antigen binding region thereof that specifically binds to human ENTPD2 comprises an HCDR1 comprising the amino acid sequence of SEQ ID NO: 7; an HCDR2 comprising the amino acid sequence of SEQ ID NO: 8; an HCDR3 comprising the amino acid sequence of SEQ ID NO: 9; an LCDR1 comprising the amino acid sequence of SEQ ID NO: 20; an LCDR2 comprising the amino acid sequence of SEQ ID NO: 18; and an LCDR3 comprising the amino acid sequence of SEQ ID NO: 16.

[0671] In some embodiments, the antibody or antigen binding region thereof that specifically binds to human ENTPD2 comprises a HCDR1 comprising the amino acid sequence of SEQ ID NO: 37, 40, 42 or 43; a HCDR2 comprising the amino acid sequence of SEQ ID NO: 38, 41, or 44; a HCDR3 comprising the amino acid sequence of SEQ ID NO: 39 or 45; a LCDR1 comprising the amino acid sequence of SEQ ID NO: 50, 53 or 56; a LCDR2 comprising the amino acid sequence of SEQ ID NO: 51 or 54; and a LCDR3 comprising the amino acid sequence of SEQ ID NO: 52 or 55.

[0672] In some embodiments, the antibody or antigen binding region thereof that specifically binds to human ENTPD2 comprises an HCDR1 comprising the amino acid sequence of SEQ ID NO: 37; an HCDR2 comprising the amino acid sequence of SEQ ID NO: 38; an HCDR3 comprising the amino acid sequence of SEQ ID NO: 39; an LCDR1 comprising the amino acid sequence of SEQ ID NO: 50; an LCDR2 comprising the amino acid sequence of SEQ ID NO: 51; and an LCDR3 comprising the amino acid sequence of SEQ ID NO: 52.

[0673] In some embodiments, the antibody or antigen binding region thereof that specifically binds to human ENTPD2 comprises an HCDR1 comprising the amino acid sequence of SEQ ID NO: 40; an HCDR2 comprising the amino acid sequence of SEQ ID NO: 41; an HCDR3 comprising the amino acid sequence of SEQ ID NO: 39; an LCDR1 comprising the amino acid sequence of SEQ ID NO: 53; an LCDR2 comprising the amino acid sequence of SEQ ID NO: 54; and an LCDR3 comprising the amino acid sequence of SEQ ID NO: 55.

[0674] In some embodiments, the antibody or antigen binding region thereof that specifically binds to human ENTPD2 comprises an HCDR1 comprising the amino acid sequence of SEQ ID NO: 42; an HCDR2 comprising the amino acid sequence of SEQ ID NO: 38; an HCDR3 comprising the amino acid sequence of SEQ ID NO: 39; an LCDR1 comprising the amino acid sequence of SEQ ID NO: 50; an LCDR2 comprising the amino acid sequence of SEQ ID NO: 51; and an LCDR3 comprising the amino acid sequence of SEQ ID NO: 52.

[0675] In some embodiments, the antibody or antigen binding region thereof that specifically binds to human ENTPD2 comprises an HCDR1 comprising the amino acid sequence of SEQ ID NO: 43; an HCDR2 comprising the amino acid sequence of SEQ ID NO: 44; an HCDR3 comprising the amino acid sequence of SEQ ID NO: 45; an LCDR1 comprising the amino acid sequence of SEQ ID NO: 56; an LCDR2 comprising the amino acid sequence of SEQ ID NO: 54; and an LCDR3 comprising the amino acid sequence of SEQ ID NO: 52.

[0676] In some embodiments, the antibody or antigen binding region thereof that specifically binds to human ENTPD2 comprises a HCDR1 comprising the amino acid sequence of SEQ ID NO: 37, 40, 42 or 43; a HCDR2 comprising the amino acid sequence of SEQ ID NO: 38, 41, or 44; a HCDR3 comprising the amino acid sequence of SEQ ID NO: 39 or 45; a LCDR1 comprising the amino acid sequence of SEQ ID NO: 61, 62, or 63; a LCDR2 comprising the amino acid sequence of SEQ ID NO: 51 or 54; and a LCDR3 comprising the amino acid sequence of SEQ ID NO: 52 or 55.

[0677] In some embodiments, the antibody or antigen binding region thereof that specifically binds to human ENTPD2 comprises an HCDR1 comprising the amino acid sequence of SEQ ID NO: 37; an HCDR2 comprising the amino acid sequence of SEQ ID NO: 38; an HCDR3 comprising the amino acid sequence of SEQ ID NO: 39; an LCDR1 comprising the amino acid sequence of SEQ ID NO: 61; an LCDR2 comprising the amino acid sequence of SEQ ID NO: 51; and an LCDR3 comprising the amino acid sequence of SEQ ID NO: 52.

[0678] In some embodiments, the antibody or antigen binding region thereof that specifically binds to human ENTPD2 comprises an HCDR1 comprising the amino acid sequence of SEQ ID NO: 40; an HCDR2 comprising the amino acid sequence of SEQ ID NO: 41; an HCDR3 comprising the amino acid sequence of SEQ ID NO: 39; an LCDR1 comprising the amino acid sequence of SEQ ID NO: 62; an LCDR2 comprising the amino acid sequence of SEQ ID NO: 54; and an LCDR3 comprising the amino acid sequence of SEQ ID NO: 55.

[0679] In some embodiments, the antibody or antigen binding region thereof that specifically binds to human ENTPD2 comprises an HCDR1 comprising the amino acid sequence of SEQ ID NO: 42; an HCDR2 comprising the amino acid sequence of SEQ ID NO: 38; an HCDR3 comprising the amino acid sequence of SEQ ID NO: 39; an LCDR1 comprising the amino acid sequence of SEQ ID NO: 61; an LCDR2 comprising the amino acid sequence of SEQ ID NO: 51; and an LCDR3 comprising the amino acid sequence of SEQ ID NO: 52.

[0680] In some embodiments, the antibody or antigen binding region thereof that specifically binds to human ENTPD2 comprises an HCDR1 comprising the amino acid sequence of SEQ ID NO: 43; an HCDR2 comprising the amino acid sequence of SEQ ID NO: 44; an HCDR3 comprising the amino acid sequence of SEQ ID NO: 45; an LCDR1 comprising the amino acid sequence of SEQ ID NO: 63; an LCDR2 comprising the amino acid sequence of SEQ ID NO: 54; and an LCDR3 comprising the amino acid sequence of SEQ ID NO: 52.

[0681] In some embodiments, the antibody or antigen binding region thereof that specifically binds to human ENTPD2 comprises a HCDR1 comprising the amino acid sequence of SEQ ID NO: 37, 40, 42 or 43; a HCDR2 comprising the amino acid sequence of SEQ ID NO: 38, 41, or 44; a HCDR3 comprising the amino acid sequence of SEQ ID NO: 68 or 69; a LCDR1 comprising the amino acid sequence of SEQ ID NO: 50, 53 or 56; a LCDR2 comprising the amino acid sequence of SEQ ID NO: 51 or 54; and a LCDR3 comprising the amino acid sequence of SEQ ID NO: 52 or 55.

[0682] In some embodiments, the antibody or antigen binding region thereof that specifically binds to human ENTPD2 comprises an HCDR1 comprising the amino acid sequence of SEQ ID NO: 37; an HCDR2 comprising the amino acid sequence of SEQ ID NO: 38; an HCDR3 comprising the amino acid sequence of SEQ ID NO: 68; an LCDR1 comprising the amino acid sequence of SEQ ID NO: 50; an LCDR2 comprising the amino acid sequence of SEQ ID NO: 51; and an LCDR3 comprising the amino acid sequence of SEQ ID NO: 52.

[0683] In some embodiments, the antibody or antigen binding region thereof that specifically binds to human ENTPD2 comprises an HCDR1 comprising the amino acid sequence of SEQ ID NO: 40; an HCDR2 comprising the amino acid sequence of SEQ ID NO: 41; an HCDR3 comprising the amino acid sequence of SEQ ID NO: 68; an LCDR1 comprising the amino acid sequence of SEQ ID NO: 53; an LCDR2 comprising the amino acid sequence of SEQ ID NO: 54; and an LCDR3 comprising the amino acid sequence of SEQ ID NO: 55.

[0684] In some embodiments, the antibody or antigen binding region thereof that specifically binds to human ENTPD2 comprises an HCDR1 comprising the amino acid sequence of SEQ ID NO: 42; an HCDR2 comprising the amino acid sequence of SEQ ID NO: 38; an HCDR3 comprising the amino acid sequence of SEQ ID NO: 68; an LCDR1 comprising the amino acid sequence of SEQ ID NO: 50; an LCDR2 comprising the amino acid sequence of SEQ ID NO: 51; and an LCDR3 comprising the amino acid sequence of SEQ ID NO: 52.

[0685] In some embodiments, the antibody or antigen binding region thereof that specifically binds to human ENTPD2 comprises an HCDR1 comprising the amino acid sequence of SEQ ID NO: 43; an HCDR2 comprising the amino acid sequence of SEQ ID NO: 44; an HCDR3 comprising the amino acid sequence of SEQ ID NO: 69; an LCDR1 comprising the amino acid sequence of SEQ ID NO: 56; an LCDR2 comprising the amino acid sequence of SEQ ID NO: 54; and an LCDR3 comprising the amino acid sequence of SEQ ID NO: 52.

[0686] In some embodiments, the antibody or antigen binding region thereof that specifically binds to human ENTPD2 comprises a HCDR1 comprising the amino acid sequence of SEQ ID NO: 82, 85, 87, or 88; a HCDR2 comprising the amino acid sequence of SEQ ID NO: 83, 86, or 89; a HCDR3 comprising the amino acid sequence of SEQ ID NO: 84 or 90; a LCDR1 comprising the amino acid sequence of SEQ ID NO: 95, 98, or 101; a LCDR2 comprising the amino acid sequence of SEQ ID NO: 96 or 99; and a LCDR3 comprising the amino acid sequence of SEQ ID NO: 97 or 100.

[0687] In some embodiments, the antibody or antigen binding region thereof that specifically binds to human ENTPD2 comprises an HCDR1 comprising the amino acid sequence of SEQ ID NO: 82; an HCDR2 comprising the amino acid sequence of SEQ ID NO: 83; an HCDR3 comprising the amino acid sequence of SEQ ID NO: 84; an LCDR1 comprising the amino acid sequence of SEQ ID NO: 95; an LCDR2 comprising the amino acid sequence of SEQ ID NO: 96; and an LCDR3 comprising the amino acid sequence of SEQ ID NO: 97.

[0688] In some embodiments, the antibody or antigen binding region thereof that specifically binds to human ENTPD2 comprises an HCDR1 comprising the amino acid sequence of SEQ ID NO: 85; an HCDR2 comprising the amino acid sequence of SEQ ID NO: 86; an HCDR3 comprising the amino acid sequence of SEQ ID NO: 84; an LCDR1 comprising the amino acid sequence of SEQ ID NO: 98; an LCDR2 comprising the amino acid sequence of SEQ ID NO: 99; and an LCDR3 comprising the amino acid sequence of SEQ ID NO: 100.

[0689] In some embodiments, the antibody or antigen binding region thereof that specifically binds to human ENTPD2 comprises an HCDR1 comprising the amino acid sequence of SEQ ID NO: 87; an HCDR2 comprising the amino acid sequence of SEQ ID NO: 83; an HCDR3 comprising the amino acid sequence of SEQ ID NO: 84; an LCDR1 comprising the amino acid sequence of SEQ ID NO: 95; an LCDR2 comprising the amino acid sequence of SEQ ID NO: 96; and an LCDR3 comprising the amino acid sequence of SEQ ID NO: 97.

[0690] In some embodiments, the antibody or antigen binding region thereof that specifically binds to human ENTPD2 comprises an HCDR1 comprising the amino acid sequence of SEQ ID NO: 88; an HCDR2 comprising the amino acid sequence of SEQ ID NO: 89; an HCDR3 comprising the amino acid sequence of SEQ ID NO: 90; an LCDR1 comprising the amino acid sequence of SEQ ID NO: 101; an LCDR2 comprising the amino acid sequence of SEQ ID NO: 99; and an LCDR3 comprising the amino acid sequence of SEQ ID NO: 97.

[0691] In some embodiments, the antibody or antigen binding region thereof that specifically binds to human ENTPD2 comprises a HCDR1 comprising the amino acid sequence of SEQ ID NO: 106, 109, 111, or 112; a HCDR2 comprising the amino acid sequence of SEQ ID NO: 107, 110, or 113; a HCDR3 comprising the amino acid sequence of SEQ ID NO: 108 or 114; a LCDR1 comprising the amino acid sequence of SEQ ID NO: 119, 122, or 124; a LCDR2 comprising the amino acid sequence of SEQ ID NO: 99 or 120; and a LCDR3 comprising the amino acid sequence of SEQ ID NO: 121 or 123.

[0692] In some embodiments, the antibody or antigen binding region thereof that specifically binds to human ENTPD2 comprises an HCDR1 comprising the amino acid sequence of SEQ ID NO: 106; an HCDR2 comprising the amino acid sequence of SEQ ID NO: 107; an HCDR3 comprising the amino acid sequence of SEQ ID NO: 108; an LCDR1 comprising the amino acid sequence of SEQ ID NO: 119; an LCDR2 comprising the amino acid sequence of SEQ ID NO: 120; and an LCDR3 comprising the amino acid sequence of SEQ ID NO: 121.

[0693] In some embodiments, the antibody or antigen binding region thereof that specifically binds to human ENTPD2 comprises an HCDR1 comprising the amino acid sequence of SEQ ID NO: 109; an HCDR2 comprising the amino acid sequence of SEQ ID NO: 110; an HCDR3 comprising the amino acid sequence of SEQ ID NO: 108; an LCDR1 comprising the amino acid sequence of SEQ ID NO: 122; an LCDR2 comprising the amino acid sequence of SEQ ID NO: 99; and an LCDR3 comprising the amino acid sequence of SEQ ID NO: 123.

[0694] In some embodiments, the antibody or antigen binding region thereof that specifically binds to human ENTPD2 comprises an HCDR1 comprising the amino acid sequence of SEQ ID NO: 111; an HCDR2 comprising the amino acid sequence of SEQ ID NO: 107; an HCDR3 comprising the amino acid sequence of SEQ ID NO: 119; an LCDR1 comprising the amino acid sequence of SEQ ID NO: 120; an LCDR2 comprising the amino acid sequence of SEQ ID NO: 121; and an LCDR3 comprising the amino acid sequence of SEQ ID NO: 108.

[0695] In some embodiments, the antibody or antigen binding region thereof that specifically binds to human ENTPD2 comprises an HCDR1 comprising the amino acid sequence of SEQ ID NO: 112; an HCDR2 comprising the amino acid sequence of SEQ ID NO: 113; an HCDR3 comprising the amino acid sequence of SEQ ID NO: 114; an LCDR1 comprising the amino acid sequence of SEQ ID NO: 124; an LCDR2 comprising the amino acid sequence of SEQ ID NO: 99; and an LCDR3 comprising the amino acid sequence of SEQ ID NO: 121.

[0696] In some embodiments, the antibody or antigen binding region thereof that specifically binds to human ENTPD2 comprises a HCDR1 comprising the amino acid sequence of SEQ ID NO: 106, 109, 111, or 112; a HCDR2 comprising the amino acid sequence of SEQ ID NO: 129, 130, or 131; a HCDR3 comprising the amino acid sequence of SEQ ID NO: 108 or 114; a LCDR1 comprising the amino acid sequence of SEQ ID NO: 119, 122, or 124; a LCDR2 comprising the amino acid sequence of SEQ ID NO: 99 or 120; and a LCDR3 comprising the amino acid sequence of SEQ ID NO: 121 or 123.

[0697] In some embodiments, the antibody or antigen binding region thereof that specifically binds to human ENTPD2 comprises an HCDR1 comprising the amino acid sequence of SEQ ID NO: 106; an HCDR2 comprising the amino acid sequence of SEQ ID NO: 129; an HCDR3 comprising the amino acid sequence of SEQ ID NO: 108; an LCDR1 comprising the amino acid sequence of SEQ ID NO: 119; an LCDR2 comprising the amino acid sequence of SEQ ID NO: 120; and an LCDR3 comprising the amino acid sequence of SEQ ID NO: 121.

[0698] In some embodiments, the antibody or antigen binding region thereof that specifically binds to human ENTPD2 comprises an HCDR1 comprising the amino acid sequence of SEQ ID NO: 109; an HCDR2 comprising the amino acid sequence of SEQ ID NO: 130; an HCDR3 comprising the amino acid sequence of SEQ ID NO: 108; an LCDR1 comprising the amino acid sequence of SEQ ID NO: 122; an LCDR2 comprising the amino acid sequence of SEQ ID NO: 99; and an LCDR3 comprising the amino acid sequence of SEQ ID NO: 123.

[0699] In some embodiments, the antibody or antigen binding region thereof that specifically binds to human ENTPD2 comprises an HCDR1 comprising the amino acid sequence of SEQ ID NO: 111; an HCDR2 comprising the amino acid sequence of SEQ ID NO: 129; an HCDR3 comprising the amino acid sequence of SEQ ID NO: 108; an LCDR1 comprising the amino acid sequence of SEQ ID NO: 119; an LCDR2 comprising the amino acid sequence of SEQ ID NO: 120; and an LCDR3 comprising the amino acid sequence of SEQ ID NO: 121.

[0700] In some embodiments, the antibody or antigen binding region thereof that specifically binds to human ENTPD2 comprises an HCDR1 comprising the amino acid sequence of SEQ ID NO: 112; an HCDR2 comprising the amino acid sequence of SEQ ID NO: 131; an HCDR3 comprising the amino acid sequence of SEQ ID NO: 114; an LCDR1 comprising the amino acid sequence of SEQ ID NO: 124; an LCDR2 comprising the amino acid sequence of SEQ ID NO: 99; and an LCDR3 comprising the amino acid sequence of SEQ ID NO: 121.

[0701] In some embodiments, the antibody or antigen binding region thereof that specifically binds to human ENTPD2 comprises a HCDR1 comprising the amino acid sequence of SEQ ID NO: 136, 139, 141, or 142; a HCDR2 comprising the amino acid sequence of SEQ ID NO: 137, 140, or 143; a HCDR3 comprising the amino acid sequence of SEQ ID NO: 138 or 144; a LCDR1 comprising the amino acid sequence of SEQ ID NO: 149, 152, or 155; a LCDR2 comprising the amino acid sequence of SEQ ID NO: 150 or 153; and a LCDR3 comprising the amino acid sequence of SEQ ID NO: 151 or 154.

[0702] In some embodiments, the antibody or antigen binding region thereof that specifically binds to human ENTPD2 comprises an HCDR1 comprising the amino acid sequence of SEQ ID NO: 136; an HCDR2 comprising the amino acid sequence of SEQ ID NO: 137; an HCDR3 comprising the amino acid sequence of SEQ ID NO: 138; an LCDR1 comprising the amino acid sequence of SEQ ID NO: 149; an LCDR2 comprising the amino acid sequence of SEQ ID NO: 150; and an LCDR3 comprising the amino acid sequence of SEQ ID NO: 151.

[0703] In some embodiments, the antibody or antigen binding region thereof that specifically binds to human ENTPD2 comprises an HCDR1 comprising the amino acid sequence of SEQ ID NO: 139; an HCDR2 comprising the amino acid sequence of SEQ ID NO: 140; an HCDR3 comprising the amino acid sequence of SEQ ID NO: 138; an LCDR1 comprising the amino acid sequence of SEQ ID NO: 152; an LCDR2 comprising the amino acid sequence of SEQ ID NO: 153; and an LCDR3 comprising the amino acid sequence of SEQ ID NO: 154.

[0704] In some embodiments, the antibody or antigen binding region thereof that specifically binds to human ENTPD2 comprises an HCDR1 comprising the amino acid sequence of SEQ ID NO: 141; an HCDR2 comprising the amino acid sequence of SEQ ID NO: 137; an HCDR3 comprising the amino acid sequence of SEQ ID NO: 138; an LCDR1 comprising the amino acid sequence of SEQ ID NO: 149; an LCDR2 comprising the amino acid sequence of SEQ ID NO: 150; and an LCDR3 comprising the amino acid sequence of SEQ ID NO: 151.

[0705] In some embodiments, the antibody or antigen binding region thereof that specifically binds to human ENTPD2 comprises an HCDR1 comprising the amino acid sequence of SEQ ID NO: 142; an HCDR2 comprising the amino acid sequence of SEQ ID NO: 143; an HCDR3 comprising the amino acid sequence of SEQ ID NO: 144; an LCDR1 comprising the amino acid sequence of SEQ ID NO: 155; an LCDR2 comprising the amino acid sequence of SEQ ID NO: 153; and an LCDR3 comprising the amino acid sequence of SEQ ID NO: 151.

[0706] In some embodiments, the antibody or antigen binding region thereof that specifically binds to human ENTPD2 comprises a HCDR1 comprising the amino acid sequence of SEQ ID NO: 160, 163, 165, or 166; a HCDR2 comprising the amino acid sequence of SEQ ID NO: 161, 164, or 167; a HCDR3 comprising the amino acid sequence of SEQ ID NO: 162 or 168; a LCDR1 comprising the amino acid sequence of SEQ ID NO: 173, 175, or 177; a LCDR2 comprising the amino acid sequence of SEQ ID NO: 150 or 153; and a LCDR3 comprising the amino acid sequence of SEQ ID NO: 174 or 176.

[0707] In some embodiments, the antibody or antigen binding region thereof that specifically binds to human ENTPD2 comprises an HCDR1 comprising the amino acid sequence of SEQ ID NO: 160; an HCDR2 comprising the amino acid sequence of SEQ ID NO: 161; an HCDR3 comprising the amino acid sequence of SEQ ID NO: 162; an LCDR1 comprising the amino acid sequence of SEQ ID NO: 173; an LCDR2 comprising the amino acid sequence of SEQ ID NO: 150; and an LCDR3 comprising the amino acid sequence of SEQ ID NO: 174.

[0708] In some embodiments, the antibody or antigen binding region thereof that specifically binds to human ENTPD2 comprises an HCDR1 comprising the amino acid sequence of SEQ ID NO: 163; an HCDR2 comprising the amino acid sequence of SEQ ID NO: 164; an HCDR3 comprising the amino acid sequence of SEQ ID NO: 162; an LCDR1 comprising the amino acid sequence of SEQ ID NO: 175; an LCDR2 comprising the amino acid sequence of SEQ ID NO: 153; and an LCDR3 comprising the amino acid sequence of SEQ ID NO: 176.

[0709] In some embodiments, the antibody or antigen binding region thereof that specifically binds to human ENTPD2 comprises an HCDR1 comprising the amino acid sequence of SEQ ID NO: 165; an HCDR2 comprising the amino acid sequence of SEQ ID NO: 161; an HCDR3 comprising the amino acid sequence of SEQ ID NO: 162; an LCDR1 comprising the amino acid sequence of SEQ ID NO: 173; an LCDR2 comprising the amino acid sequence of SEQ ID NO: 150; and an LCDR3 comprising the amino acid sequence of SEQ ID NO: 174.

[0710] In some embodiments, the antibody or antigen binding region thereof that specifically binds to human ENTPD2 comprises an HCDR1 comprising the amino acid sequence of SEQ ID NO: 166; an HCDR2 comprising the amino acid sequence of SEQ ID NO: 167; an HCDR3 comprising the amino acid sequence of SEQ ID NO: 168; an LCDR1 comprising the amino acid sequence of SEQ ID NO: 177; an LCDR2 comprising the amino acid sequence of SEQ ID NO: 153; and an LCDR3 comprising the amino acid sequence of SEQ ID NO: 174.

[0711] In some embodiments, the antibody or antigen binding region thereof that specifically binds to human ENTPD2 comprises a HCDR1 comprising the amino acid sequence of SEQ ID NO: 37, 40, 42, or 43; a HCDR2 comprising the amino acid sequence of SEQ ID NO: 220, 222, or 223; a HCDR3 comprising the amino acid sequence of SEQ ID NO: 221 or 224; a LCDR1 comprising the amino acid sequence of SEQ ID NO: 61, 62, or 63; a LCDR2 comprising the amino acid sequence of SEQ ID NO: 51 or 54; and a LCDR3 comprising the amino acid sequence of SEQ ID NO: 52 or 55.

[0712] In some embodiments, the antibody or antigen binding region thereof that specifically binds to human ENTPD2 comprises an HCDR1 comprising the amino acid sequence of SEQ ID NO: 37; an HCDR2 comprising the amino acid sequence of SEQ ID NO: 220; an HCDR3 comprising the amino acid sequence of SEQ ID NO: 221; an LCDR1 comprising the amino acid sequence of SEQ ID NO: 61; an LCDR2 comprising the amino acid sequence of SEQ ID NO: 51; and an LCDR3 comprising the amino acid sequence of SEQ ID NO: 52.

[0713] In some embodiments, the antibody or antigen binding region thereof that specifically binds to human ENTPD2 comprises an HCDR1 comprising the amino acid sequence of SEQ ID NO: 40; an HCDR2 comprising the amino acid sequence of SEQ ID NO: 222; an HCDR3 comprising the amino acid sequence of SEQ ID NO: 221; an LCDR1 comprising the amino acid sequence of SEQ ID NO: 62; an LCDR2 comprising the amino acid sequence of SEQ ID NO: 54; and an LCDR3 comprising the amino acid sequence of SEQ ID NO: 55.

[0714] In some embodiments, the antibody or antigen binding region thereof that specifically binds to human ENTPD2 comprises an HCDR1 comprising the amino acid sequence of SEQ ID NO: 42; an HCDR2 comprising the amino acid sequence of SEQ ID NO: 220; an HCDR3 comprising the amino acid sequence of SEQ ID NO: 221; an LCDR1 comprising the amino acid sequence of SEQ ID NO: 61; an LCDR2 comprising the amino acid sequence of SEQ ID NO: 51; and an LCDR3 comprising the amino acid sequence of SEQ ID NO: 52.

[0715] In some embodiments, the antibody or antigen binding region thereof that specifically binds to human ENTPD2 comprises an HCDR1 comprising the amino acid sequence of SEQ ID NO: 43; an HCDR2 comprising the amino acid sequence of SEQ ID NO: 223; an HCDR3 comprising the amino acid sequence of SEQ ID NO: 224; an LCDR1 comprising the amino acid sequence of SEQ ID NO: 63; an LCDR2 comprising the amino acid sequence of SEQ ID NO: 54; and an LCDR3 comprising the amino acid sequence of SEQ ID NO: 52.

[0716] In some embodiments, the antibody or antigen binding region thereof that specifically binds to human ENTPD2 comprises a HCDR1 comprising the amino acid sequence of SEQ ID NO: 37, 40, 42 or 43; a HCDR2 comprising the amino acid sequence of SEQ ID NO: 220, 222, or 223; a HCDR3 comprising the amino acid sequence of SEQ ID NO: 68 or 69; a LCDR1 comprising the amino acid sequence of SEQ ID NO: 61, 62, or 63; a LCDR2 comprising the amino acid sequence of SEQ ID NO: 51 or 54; and a LCDR3 comprising the amino acid sequence of SEQ ID NO: 52 or 55.

[0717] In some embodiments, the antibody or antigen binding region thereof that specifically binds to human ENTPD2 comprises an HCDR1 comprising the amino acid sequence of SEQ ID NO: 37; an HCDR2 comprising the amino acid sequence of SEQ ID NO: 220; an HCDR3 comprising the amino acid sequence of SEQ ID NO: 68; an LCDR1 comprising the amino acid sequence of SEQ ID NO: 61; an LCDR2 comprising the amino acid sequence of SEQ ID NO: 51; and an LCDR3 comprising the amino acid sequence of SEQ ID NO: 52.

[0718] In some embodiments, the antibody or antigen binding region thereof that specifically binds to human ENTPD2 comprises an HCDR1 comprising the amino acid sequence of SEQ ID NO: 40; an HCDR2 comprising the amino acid sequence of SEQ ID NO: 222; an HCDR3 comprising the amino acid sequence of SEQ ID NO: 68; an LCDR1 comprising the amino acid sequence of SEQ ID NO: 62; an LCDR2 comprising the amino acid sequence of SEQ ID NO: 54; and an LCDR3 comprising the amino acid sequence of SEQ ID NO: 55.

[0719] In some embodiments, the antibody or antigen binding region thereof that specifically binds to human ENTPD2 comprises an HCDR1 comprising the amino acid sequence of SEQ ID NO: 42; an HCDR2 comprising the amino acid sequence of SEQ ID NO: 220; an HCDR3 comprising the amino acid sequence of SEQ ID NO: 68; an LCDR1 comprising the amino acid sequence of SEQ ID NO: 61; an LCDR2 comprising the amino acid sequence of SEQ ID NO: 51; and an LCDR3 comprising the amino acid sequence of SEQ ID NO: 52.

[0720] In some embodiments, the antibody or antigen binding region thereof that specifically binds to human ENTPD2 comprises an HCDR1 comprising the amino acid sequence of SEQ ID NO: 43; an HCDR2 comprising the amino acid sequence of SEQ ID NO: 223; an HCDR3 comprising the amino acid sequence of SEQ ID NO: 69; an LCDR1 comprising the amino acid sequence of SEQ ID NO: 63; an LCDR2 comprising the amino acid sequence of SEQ ID NO: 54; and an LCDR3 comprising the amino acid sequence of SEQ ID NO: 52.

[0721] In some embodiments, the antibody or antigen binding region thereof that specifically binds to human ENTPD2 comprises a HCDR1 comprising the amino acid sequence of SEQ ID NO: 1, 4, 6, or 7; a HCDR2 comprising the amino acid sequence of SEQ ID NO: 245, 247, or 248; a HCDR3 comprising the amino acid sequence of SEQ ID NO: 246 or 249; a LCDR1 comprising the amino acid sequence of SEQ ID NO: 17, 20, or 254; a LCDR2 comprising the amino acid sequence of SEQ ID NO: 15 or 18; and a LCDR3 comprising the amino acid sequence of SEQ ID NO: 255 or 256.

[0722] In some embodiments, the antibody or antigen binding region thereof that specifically binds to human ENTPD2 comprises an HCDR1 comprising the amino acid sequence of SEQ ID NO: 1; an HCDR2 comprising the amino acid sequence of SEQ ID NO: 245; an HCDR3 comprising the amino acid sequence of SEQ ID NO: 246; an LCDR1 comprising the amino acid sequence of SEQ ID NO: 254; an LCDR2 comprising the amino acid sequence of SEQ ID NO: 15; and an LCDR3 comprising the amino acid sequence of SEQ ID NO: 255.

[0723] In some embodiments, the antibody or antigen binding region thereof that specifically binds to human ENTPD2 comprises an HCDR1 comprising the amino acid sequence of SEQ ID NO: 4; an HCDR2 comprising the amino acid sequence of SEQ ID NO: 247; an HCDR3 comprising the amino acid sequence of SEQ ID NO: 246; an LCDR1 comprising the amino acid sequence of SEQ ID NO: 17; an LCDR2 comprising the amino acid sequence of SEQ ID NO: 18; and an LCDR3 comprising the amino acid sequence of SEQ ID NO: 256.

[0724] In some embodiments, the antibody or antigen binding region thereof that specifically binds to human ENTPD2 comprises an HCDR1 comprising the amino acid sequence of SEQ ID NO: 6; an HCDR2 comprising the amino acid sequence of SEQ ID NO: 254; an HCDR3 comprising the amino acid sequence of SEQ ID NO: 246; an LCDR1 comprising the amino acid sequence of SEQ ID NO: 254; an LCDR2 comprising the amino acid sequence of SEQ ID NO: 15; and an LCDR3 comprising the amino acid sequence of SEQ ID NO: 255.

[0725] In some embodiments, the antibody or antigen binding region thereof that specifically binds to human ENTPD2 comprises an HCDR1 comprising the amino acid sequence of SEQ ID NO: 7; an HCDR2 comprising the amino acid sequence of SEQ ID NO: 248; an HCDR3 comprising the amino acid sequence of SEQ ID NO: 249; an LCDR1 comprising the amino acid sequence of SEQ ID NO: 20; an LCDR2 comprising the amino acid sequence of SEQ ID NO: 18; and an LCDR3 comprising the amino acid sequence of SEQ ID NO: 255.

[0726] In some embodiments, the antibody or antigen binding region thereof that specifically binds to human ENTPD2 comprises a HCDR1 comprising the amino acid sequence of SEQ ID NO: 1, 4, 6, or 7; a HCDR2 comprising the amino acid sequence of SEQ ID NO: 247, 248, or 261; a HCDR3 comprising the amino acid sequence of SEQ ID NO: 262 or 263; a LCDR1 comprising the amino acid sequence of SEQ ID NO: 17, 20, or 254; a LCDR2 comprising the amino acid sequence of SEQ ID NO: 15 or 18; and a LCDR3 comprising the amino acid sequence of SEQ ID NO: 16 or 19.

[0727] In some embodiments, the antibody or antigen binding region thereof that specifically binds to human ENTPD2 comprises an HCDR1 comprising the amino acid sequence of SEQ ID NO: 1; an HCDR2 comprising the amino acid sequence of SEQ ID NO: 261; an HCDR3 comprising the amino acid sequence of SEQ ID NO: 262; an LCDR1 comprising the amino acid sequence of SEQ ID NO: 254; an LCDR2 comprising the amino acid sequence of SEQ ID NO: 15; and an LCDR3 comprising the amino acid sequence of SEQ ID NO: 16.

[0728] In some embodiments, the antibody or antigen binding region thereof that specifically binds to human ENTPD2 comprises an HCDR1 comprising the amino acid sequence of SEQ ID NO: 4; an HCDR2 comprising the amino acid sequence of SEQ ID NO: 247; an HCDR3 comprising the amino acid sequence of SEQ ID NO: 262; an LCDR1 comprising the amino acid sequence of SEQ ID NO: 17; an LCDR2 comprising the amino acid sequence of SEQ ID NO: 18; and an LCDR3 comprising the amino acid sequence of SEQ ID NO: 19.

[0729] In some embodiments, the antibody or antigen binding region thereof that specifically binds to human ENTPD2 comprises an HCDR1 comprising the amino acid sequence of SEQ ID NO: 6; an HCDR2 comprising the amino acid sequence of SEQ ID NO: 261; an HCDR3 comprising the amino acid sequence of SEQ ID NO: 262; an LCDR1 comprising the amino acid sequence of SEQ ID NO: 254; an LCDR2 comprising the amino acid sequence of SEQ ID NO: 15; and an LCDR3 comprising the amino acid sequence of SEQ ID NO: 16.

[0730] In some embodiments, the antibody or antigen binding region thereof that specifically binds to human ENTPD2 comprises an HCDR1 comprising the amino acid sequence of SEQ ID NO: 7; an HCDR2 comprising the amino acid sequence of SEQ ID NO: 248; an HCDR3 comprising the amino acid sequence of SEQ ID NO: 263; an LCDR1 comprising the amino acid sequence of SEQ ID NO: 20; an LCDR2 comprising the amino acid sequence of SEQ ID NO: 18; and an LCDR3 comprising the amino acid sequence of SEQ ID NO: 16.

[0731] In some embodiments, the antibody or antigen binding region thereof that specifically binds to human ENTPD2 comprises a HCDR1 comprising the amino acid sequence of SEQ ID NO: 272, 275, or 278; a HCDR2 comprising the amino acid sequence of SEQ ID NO: 273, 276, or 279; a HCDR3 comprising the amino acid sequence of SEQ ID NO: 274, 277, or 280; a LCDR1 comprising the amino acid sequence of SEQ ID NO: 17, 20, or 254; a LCDR2 comprising the amino acid sequence of SEQ ID NO: 285 or 286; and a LCDR3 comprising the amino acid sequence of SEQ ID NO: 16 or 19.

[0732] In some embodiments, the antibody or antigen binding region thereof that specifically binds to human ENTPD2 comprises an HCDR1 comprising the amino acid sequence of SEQ ID NO: 272; an HCDR2 comprising the amino acid sequence of SEQ ID NO: 273; an HCDR3 comprising the amino acid sequence of SEQ ID NO: 274; an LCDR1 comprising the amino acid sequence of SEQ ID NO: 254; an LCDR2 comprising the amino acid sequence of SEQ ID NO: 285; and an LCDR3 comprising the amino acid sequence of SEQ ID NO: 16.

[0733] In some embodiments, the antibody or antigen binding region thereof that specifically binds to human ENTPD2 comprises an HCDR1 comprising the amino acid sequence of SEQ ID NO: 275; an HCDR2 comprising the amino acid sequence of SEQ ID NO: 276; an HCDR3 comprising the amino acid sequence of SEQ ID NO: 274; an LCDR1 comprising the amino acid sequence of SEQ ID NO: 17; an LCDR2 comprising the amino acid sequence of SEQ ID NO: 286; and an LCDR3 comprising the amino acid sequence of SEQ ID NO: 19.

[0734] In some embodiments, the antibody or antigen binding region thereof that specifically binds to human ENTPD2 comprises an HCDR1 comprising the amino acid sequence of SEQ ID NO: 277; an HCDR2 comprising the amino acid sequence of SEQ ID NO: 273; an HCDR3 comprising the amino acid sequence of SEQ ID NO: 274; an LCDR1 comprising the amino acid sequence of SEQ ID NO: 254; an LCDR2 comprising the amino acid sequence of SEQ ID NO: 285; and an LCDR3 comprising the amino acid sequence of SEQ ID NO: 16.

[0735] In some embodiments, the antibody or antigen binding region thereof that specifically binds to human ENTPD2 comprises an HCDR1 comprising the amino acid sequence of SEQ ID NO: 278; an HCDR2 comprising the amino acid sequence of SEQ ID NO: 279; an HCDR3 comprising the amino acid sequence of SEQ ID NO: 280; an LCDR1 comprising the amino acid sequence of SEQ ID NO: 20; an LCDR2 comprising the amino acid sequence of SEQ ID NO: 286; and an LCDR3 comprising the amino acid sequence of SEQ ID NO: 16.

[0736] In some embodiments, the antibody or antigen binding region thereof that specifically binds to human ENTPD2 comprises a heavy chain variable region (VH) comprising the amino acid sequence of SEQ ID NO: 10 (or a sequence at least about 90%, 95%, 99% or more identical thereto, and/or having one, two, three or more substitutions, insertions, deletions, or modifications), and a light chain variable region (VL) comprising the amino acid sequence of SEQ ID NO: 21(or a sequence at least about 90%, 95%, 99% or more identical thereto, and/or having one, two, three or more substitutions, insertions, deletions, or modifications).

[0737] In some embodiments, the antibody or antigen binding region thereof that specifically binds to human ENTPD2 comprises a heavy chain variable region (VH) comprising the amino acid sequence of SEQ ID NO: 25 (or a sequence at least about 90%, 95%, 99% or more identical thereto, and/or having one, two, three or more substitutions, insertions, deletions, or modifications), and a light chain variable region (VL) comprising the amino acid sequence of SEQ ID NO: 29 (or a sequence at least about 90%, 95%, 99% or more identical thereto, and/or having one, two, three or more substitutions, insertions, deletions, or modifications).

[0738] In some embodiments, the antibody or antigen binding region thereof that specifically binds to human ENTPD2 comprises a heavy chain variable region (VH) comprising the amino acid sequence of SEQ ID NO: 33 (or a sequence at least about 90%, 95%, 99% or more identical thereto, and/or having one, two, three or more substitutions, insertions, deletions, or modifications), and a light chain variable region (VL) comprising the amino acid sequence of SEQ ID NO: 29 (or a sequence at least about 90%, 95%, 99% or more identical thereto, and/or having one, two, three or more substitutions, insertions, deletions, or modifications).

[0739] In some embodiments, the antibody or antigen binding region thereof that specifically binds to human ENTPD2 comprises a heavy chain variable region (VH) comprising the amino acid sequence of SEQ ID NO: 46 (or a sequence at least about 90%, 95%, 99% or more identical thereto, and/or having one, two, three or more substitutions, insertions, deletions, or modifications), and a light chain variable region (VL) comprising the amino acid sequence of SEQ ID NO: 57 (or a sequence at least about 90%, 95%, 99% or more identical thereto, and/or having one, two, three or more substitutions, insertions, deletions, or modifications).

[0740] In some embodiments, the antibody or antigen binding region thereof that specifically binds to human ENTPD2 comprises a heavy chain variable region (VH) comprising the amino acid sequence of SEQ ID NO: 46 (or a sequence at least about 90%, 95%, 99% or more identical thereto, and/or having one, two, three or more substitutions, insertions, deletions, or modifications), and a light chain variable region (VL) comprising the amino acid sequence of SEQ ID NO: 64(or a sequence at least about 90%, 95%, 99% or more identical thereto, and/or having one, two, three or more substitutions, insertions, deletions, or modifications).

[0741] In some embodiments, the antibody or antigen binding region thereof that specifically binds to human ENTPD2 comprises a heavy chain variable region (VH) comprising the amino acid sequence of SEQ ID NO: 70 (or a sequence at least about 90%, 95%, 99% or more identical thereto, and/or having one, two, three or more substitutions, insertions, deletions, or modifications), and a light chain variable region (VL) comprising the amino acid sequence of SEQ ID NO: 74 (or a sequence at least about 90%, 95%, 99% or more identical thereto, and/or having one, two, three or more substitutions, insertions, deletions, or modifications).

[0742] In some embodiments, the antibody or antigen binding region thereof that specifically binds to human ENTPD2 comprises a heavy chain variable region (VH) comprising the amino acid sequence of SEQ ID NO: 25 (or a sequence at least about 90%, 95%, 99% or more identical thereto, and/or having one, two, three or more substitutions, insertions, deletions, or modifications), and a light chain variable region (VL) comprising the amino acid sequence of SEQ ID NO: 78 (or a sequence at least about 90%, 95%, 99% or more identical thereto, and/or having one, two, three or more substitutions, insertions, deletions, or modifications).

[0743] In some embodiments, the antibody or antigen binding region thereof that specifically binds to human ENTPD2 comprises a heavy chain variable region (VH) comprising the amino acid sequence of SEQ ID NO: 91 (or a sequence at least about 90%, 95%, 99% or more identical thereto, and/or having one, two, three or more substitutions, insertions, deletions, or modifications), and a light chain variable region (VL) comprising the amino acid sequence of SEQ ID NO: 102 (or a sequence at least about 90%, 95%, 99% or more identical thereto, and/or having one, two, three or more substitutions, insertions, deletions, or modifications).

[0744] In some embodiments, the antibody or antigen binding region thereof that specifically binds to human ENTPD2 comprises a heavy chain variable region (VH) comprising the amino acid sequence of SEQ ID NO: 115 (or a sequence at least about 90%, 95%, 99% or more identical thereto, and/or having one, two, three or more substitutions, insertions, deletions, or modifications), and a light chain variable region (VL) comprising the amino acid sequence of SEQ ID NO: 125 (or a sequence at least about 90%, 95%, 99% or more identical thereto, and/or having one, two, three or more substitutions, insertions, deletions, or modifications).

[0745] In some embodiments, the antibody or antigen binding region thereof that specifically binds to human ENTPD2 comprises a heavy chain variable region (VH) comprising the amino acid sequence of SEQ ID NO: 132 (or a sequence at least about 90%, 95%, 99% or more identical thereto, and/or having one, two, three or more substitutions, insertions, deletions, or modifications), and a light chain variable region (VL) comprising the amino acid sequence of SEQ ID NO: 125 (or a sequence at least about 90%, 95%, 99% or more identical thereto, and/or having one, two, three or more substitutions, insertions, deletions, or modifications).

[0746] In some embodiments, the antibody or antigen binding region thereof that specifically binds to human ENTPD2 comprises a heavy chain variable region (VH) comprising the amino acid sequence of SEQ ID NO: 145 (or a sequence at least about 90%, 95%, 99% or more identical thereto, and/or having one, two, three or more substitutions, insertions, deletions, or modifications), and a light chain variable region (VL) comprising the amino acid sequence of SEQ ID NO: 156 (or a sequence at least about 90%, 95%, 99% or more identical thereto, and/or having one, two, three or more substitutions, insertions, deletions, or modifications).

[0747] In some embodiments, the antibody or antigen binding region thereof that specifically binds to human ENTPD2 comprises a heavy chain variable region (VH) comprising the amino acid sequence of SEQ ID NO: 169 (or a sequence at least about 90%, 95%, 99% or more identical thereto, and/or having one, two, three or more substitutions, insertions, deletions, or modifications), and a light chain variable region (VL) comprising the amino acid sequence of SEQ ID NO: 178 (or a sequence at least about 90%, 95%, 99% or more identical thereto, and/or having one, two, three or more substitutions, insertions, deletions, or modifications).

[0748] In some embodiments, the antibody or antigen binding region thereof that specifically binds to human ENTPD2 comprises a heavy chain variable region (VH) comprising the amino acid sequence of SEQ ID NO: 225 (or a sequence at least about 90%, 95%, 99% or more identical thereto, and/or having one, two, three or more substitutions, insertions, deletions, or modifications), and a light chain variable region (VL) comprising the amino acid sequence of SEQ ID NO: 229 (or a sequence at least about 90%, 95%, 99% or more identical thereto, and/or having one, two, three or more substitutions, insertions, deletions, or modifications).

[0749] In some embodiments, the antibody or antigen binding region thereof that specifically binds to human ENTPD2 comprises a heavy chain variable region (VH) comprising the amino acid sequence of SEQ ID NO: 233 (or a sequence at least about 90%, 95%, 99% or more identical thereto, and/or having one, two, three or more substitutions, insertions, deletions, or modifications), and a light chain variable region (VL) comprising the amino acid sequence of SEQ ID NO: 237 (or a sequence at least about 90%, 95%, 99% or more identical thereto, and/or having one, two, three or more substitutions, insertions, deletions, or modifications).

[0750] In some embodiments, the antibody or antigen binding region thereof that specifically binds to human ENTPD2 comprises a heavy chain variable region (VH) comprising the amino acid sequence of SEQ ID NO: 241 (or a sequence at least about 90%, 95%, 99% or more identical thereto, and/or having one, two, three or more substitutions, insertions, deletions, or modifications), and a light chain variable region (VL) comprising the amino acid sequence of SEQ ID NO: 229 (or a sequence at least about 90%, 95%, 99% or more identical thereto, and/or having one, two, three or more substitutions, insertions, deletions, or modifications).

[0751] In some embodiments, the antibody or antigen binding region thereof that specifically binds to human ENTPD2 comprises a heavy chain variable region (VH) comprising the amino acid sequence of SEQ ID NO: 250 (or a sequence at least about 90%, 95%, 99% or more identical thereto, and/or having one, two, three or more substitutions, insertions, deletions, or modifications), and a light chain variable region (VL) comprising the amino acid sequence of SEQ ID NO: 257 (or a sequence at least about 90%, 95%, 99% or more identical thereto, and/or having one, two, three or more substitutions, insertions, deletions, or modifications).

[0752] In some embodiments, the antibody or antigen binding region thereof that specifically binds to human ENTPD2 comprises a heavy chain variable region (VH) comprising the amino acid sequence of SEQ ID NO: 264 (or a sequence at least about 90%, 95%, 99% or more identical thereto, and/or having one, two, three or more substitutions, insertions, deletions, or modifications), and a light chain variable region (VL) comprising the amino acid sequence of SEQ ID NO: 268 (or a sequence at least about 90%, 95%, 99% or more identical thereto, and/or having one, two, three or more substitutions, insertions, deletions, or modifications).

[0753] In some embodiments, the antibody or antigen binding region thereof that specifically binds to human ENTPD2 comprises a heavy chain variable region (VH) comprising the amino acid sequence of SEQ ID NO: 281 (or a sequence at least about 90%, 95%, 99% or more identical thereto, and/or having one, two, three or more substitutions, insertions, deletions, or modifications), and a light chain variable region (VL) comprising the amino acid sequence of SEQ ID NO: 287 (or a sequence at least about 90%, 95%, 99% or more identical thereto, and/or having one, two, three or more substitutions, insertions, deletions, or modifications).

[0754] In some embodiments, the antibody that specifically binds to human ENTPD2 comprises a heavy chain comprising the amino acid sequence of SEQ ID NO: 12 (or a sequence at least about 90%, 95%, 99% or more identical thereto, and/or having one, two, three or more substitutions, insertions, deletions, or modifications), and a light chain comprising the amino acid sequence of SEQ ID NO: 23 (or a sequence at least about 90%, 95%, 99% or more identical thereto, and/or having one, two, three or more substitutions, insertions, deletions, or modifications).

[0755] In some embodiments, the antibody that specifically binds to human ENTPD2 comprises a heavy chain comprising the amino acid sequence of SEQ ID NO: 27 (or a sequence at least about 90%, 95%, 99% or more identical thereto, and/or having one, two, three or more substitutions, insertions, deletions, or modifications), and a light chain comprising the amino acid sequence of SEQ ID NO: 31 (or a sequence at least about 90%, 95%, 99% or more identical thereto, and/or having one, two, three or more substitutions, insertions, deletions, or modifications).

[0756] In some embodiments, the antibody that specifically binds to human ENTPD2 comprises a heavy chain comprising the amino acid sequence of SEQ ID NO: 35 (or a sequence at least about 90%, 95%, 99% or more identical thereto, and/or having one, two, three or more substitutions, insertions, deletions, or modifications), and a light chain comprising the amino acid sequence of SEQ ID NO: 31 (or a sequence at least about 90%, 95%, 99% or more identical thereto, and/or having one, two, three or more substitutions, insertions, deletions, or modifications).

[0757] In some embodiments, the antibody that specifically binds to human ENTPD2 comprises a heavy chain comprising the amino acid sequence of SEQ ID NO: 48 (or a sequence at least about 90%, 95%, 99% or more identical thereto, and/or having one, two, three or more substitutions, insertions, deletions, or modifications), and a light chain comprising the amino acid sequence of SEQ ID NO: 59 (or a sequence at least about 90%, 95%, 99% or more identical thereto, and/or having one, two, three or more substitutions, insertions, deletions, or modifications).

[0758] In some embodiments, the antibody that specifically binds to human ENTPD2 comprises a heavy chain comprising the amino acid sequence of SEQ ID NO: 48 (or a sequence at least about 90%, 95%, 99% or more identical thereto, and/or having one, two, three or more substitutions, insertions, deletions, or modifications), and a light chain comprising the amino acid sequence of SEQ ID NO: 66 (or a sequence at least about 90%, 95%, 99% or more identical thereto, and/or having one, two, three or more substitutions, insertions, deletions, or modifications).

[0759] In some embodiments, the antibody that specifically binds to human ENTPD2 comprises a heavy chain comprising the amino acid sequence of SEQ ID NO: 72 (or a sequence at least about 90%, 95%, 99% or more identical thereto, and/or having one, two, three or more substitutions, insertions, deletions, or modifications), and a light chain comprising the amino acid sequence of SEQ ID NO: 76 (or a sequence at least about 90%, 95%, 99% or more identical thereto, and/or having one, two, three or more substitutions, insertions, deletions, or modifications).

[0760] In some embodiments, the antibody that specifically binds to human ENTPD2 comprises a heavy chain comprising the amino acid sequence of SEQ ID NO: 27 (or a sequence at least about 90%, 95%, 99% or more identical thereto, and/or having one, two, three or more substitutions, insertions, deletions, or modifications), and a light chain comprising the amino acid sequence of SEQ ID NO: 80 (or a sequence at least about 90%, 95%, 99% or more identical thereto, and/or having one, two, three or more substitutions, insertions, deletions, or modifications).

[0761] In some embodiments, the antibody that specifically binds to human ENTPD2 comprises a heavy chain comprising the amino acid sequence of SEQ ID NO: 93 (or a sequence at least about 90%, 95%, 99% or more identical thereto, and/or having one, two, three or more substitutions, insertions, deletions, or modifications), and a light chain comprising the amino acid sequence of SEQ ID NO: 104 (or a sequence at least about 90%, 95%, 99% or more identical thereto, and/or having one, two, three or more substitutions, insertions, deletions, or modifications).

[0762] In some embodiments, the antibody that specifically binds to human ENTPD2 comprises a heavy chain comprising the amino acid sequence of SEQ ID NO: 117 (or a sequence at least about 90%, 95%, 99% or more identical thereto, and/or having one, two, three or more substitutions, insertions, deletions, or modifications), and a light chain comprising the amino acid sequence of SEQ ID NO: 127 (or a sequence at least about 90%, 95%, 99% or more identical thereto, and/or having one, two, three or more substitutions, insertions, deletions, or modifications).

[0763] In some embodiments, the antibody that specifically binds to human ENTPD2 comprises a heavy chain comprising the amino acid sequence of SEQ ID NO: 134 (or a sequence at least about 90%, 95%, 99% or more identical thereto, and/or having one, two, three or more substitutions, insertions, deletions, or modifications), and a light chain comprising the amino acid sequence of SEQ ID NO: 127 (or a sequence at least about 90%, 95%, 99% or more identical thereto, and/or having one, two, three or more substitutions, insertions, deletions, or modifications).

[0764] In some embodiments, the antibody that specifically binds to human ENTPD2 comprises a heavy chain comprising the amino acid sequence of SEQ ID NO: 147 (or a sequence at least about 90%, 95%, 99% or more identical thereto, and/or having one, two, three or more substitutions, insertions, deletions, or modifications), and a light chain comprising the amino acid sequence of SEQ ID NO: 158 (or a sequence at least about 90%, 95%, 99% or more identical thereto, and/or having one, two, three or more substitutions, insertions, deletions, or modifications).

[0765] In some embodiments, the antibody that specifically binds to human ENTPD2 comprises a heavy chain comprising the amino acid sequence of SEQ ID NO: 171 (or a sequence at least about 90%, 95%, 99% or more identical thereto, and/or having one, two, three or more substitutions, insertions, deletions, or modifications), and a light chain comprising SEQ ID NO: 180 (or a sequence at least about 90%, 95%, 99% or more identical thereto, and/or having one, two, three or more substitutions, insertions, deletions, or modifications).

[0766] In some embodiments, the antibody that specifically binds to human ENTPD2 comprises a heavy chain comprising the amino acid sequence of SEQ ID NO: 227 (or a sequence at least about 90%, 95%, 99% or more identical thereto, and/or having one, two, three or more substitutions, insertions, deletions, or modifications), and a light chain comprising the amino acid sequence of SEQ ID NO: 231 (or a sequence at least about 90%, 95%, 99% or more identical thereto, and/or having one, two, three or more substitutions, insertions, deletions, or modifications).

[0767] In some embodiments, the antibody that specifically binds to human ENTPD2 comprises a heavy chain comprising the amino acid sequence of SEQ ID NO: 235 (or a sequence at least about 90%, 95%, 99% or more identical thereto, and/or having one, two, three or more substitutions, insertions, deletions, or modifications), and a light chain comprising the amino acid sequence of SEQ ID NO: 239 (or a sequence at least about 90%, 95%, 99% or more identical thereto, and/or having one, two, three or more substitutions, insertions, deletions, or modifications).

[0768] In some embodiments, the antibody that specifically binds to human ENTPD2 comprises a heavy chain comprising the amino acid sequence of SEQ ID NO: 243 (or a sequence at least about 90%, 95%, 99% or more identical thereto, and/or having one, two, three or more substitutions, insertions, deletions, or modifications), and a light chain comprising the amino acid sequence of SEQ ID NO: 231 (or a sequence at least about 90%, 95%, 99% or more identical thereto, and/or having one, two, three or more substitutions, insertions, deletions, or modifications).

[0769] In some embodiments, the antibody that specifically binds to human ENTPD2 comprises a heavy chain comprising the amino acid sequence of SEQ ID NO: 252 (or a sequence at least about 90%, 95%, 99% or more identical thereto, and/or having one, two, three or more substitutions, insertions, deletions, or modifications), and a light chain comprising the amino acid sequence of SEQ ID NO: 259 (or a sequence at least about 90%, 95%, 99% or more identical thereto, and/or having one, two, three or more substitutions, insertions, deletions, or modifications).

[0770] In some embodiments, the antibody that specifically binds to human ENTPD2 comprises a heavy chain comprising the amino acid sequence of SEQ ID NO: 266 (or a sequence at least about 90%, 95%, 99% or more identical thereto, and/or having one, two, three or more substitutions, insertions, deletions, or modifications), and a light chain comprising the amino acid sequence of SEQ ID NO: 270 (or a sequence at least about 90%, 95%, 99% or more identical thereto, and/or having one, two, three or more substitutions, insertions, deletions, or modifications).

[0771] In some embodiments, the antibody that specifically binds to human ENTPD2 comprises a heavy chain comprising the amino acid sequence of SEQ ID NO: 283 (or a sequence at least about 90%, 95%, 99% or more identical thereto, and/or having one, two, three or more substitutions, insertions, deletions, or modifications), and a light chain comprising the amino acid sequence of SEQ ID NO: 289 (or a sequence at least about 90%, 95%, 99% or more identical thereto, and/or having one, two, three or more substitutions, insertions, deletions, or modifications).

[0772] In some embodiments of the combination of the present invention the antibody or antigen-binding fragment thereof which binds to human ENTPD2 protein, binds to said protein with a dissociation constant (KD) of less than 10 nM, e.g., a KD of less than 9 nM, less than 8 nM, less than 7 nM, less than 6 nM, less than 5 nM, less than 4 nM, less than 3 nM, less than 2 nM, less than 1 nM, e.g., as measured by Biacore. In some embodiments, the antibodies or antigen-binding fragments provided herein which bind to human ENTPD2 protein bind to said protein with a dissociation constant (KD) of less than 5 nM, e.g., as measured by Biacore. In some embodiments, the antibodies or antigen-binding fragments provided herein which bind to human ENTPD2 protein bind to said protein with a dissociation constant (KD) of less than 3 nM, e.g., as measured by Biacore. In some embodiments, the antibodies or antigen-binding fragments provided herein which bind to human ENTPD2 protein bind to said protein with a dissociation constant (KD) of less than 1 nM, e.g., as measured by Biacore. In some embodiments, the dissociation constant of the antibodies or antigen binding fragments thereof described herein which bind to human ENTPD2 is measured by Biacore at 25° C.

[0773] In some embodiments of the combination of the invention are antibodies or antigen binding fragments thereof that specifically bind to an epitope in human ENTPD2, wherein the epitope comprises at least one (e.g., at least two, at least three, at least four, at least five, at least six, at least seven, at least eight, at least nine, at least ten, at least eleven, at least twelve, at least thirteen, at least fourteen, at least fifteen, at least twenty) of the following residues: His50, Asp76, Pro78, Gly79, Gly80, Tyr85, Asp87, Asn88, Gly91, Gln94, Ser95, Gly98, Glu101, Gln102, Gln105, Asp106, Arg245, Thr272, Gln273, Leu275, Asp278, Arg298, Ala347, Ala350, Thr351, Arg392, Ala393, Arg394, or Tyr398. In some embodiments of the combination of the invention, such antibodies or antigen binding fragments include, but are not limited to, MAb1, MAb2, MAb3, MAb7, MAb17, MAb19, MAb20, MAb21, and Fab23 as disclosed in Table 1.

[0774] In some embodiments of the combination of the invention are also antibodies or antigen binding fragments thereof that specifically bind to an epitope in human ENTPD2, wherein the epitope comprises at least one (e.g., at least two, at least three, at least four, at least five, at least six, at least seven, at least eight, at least nine, at least ten, at least eleven, at least twelve, at least thirteen, at least fourteen, at least fifteen, at least twenty) of the following residues: Gly79, Gln250, Leu253, Trp266, Arg268, Gly269, Phe270, Ser271, Thr272, Gln273, Val274, Leu275, Asp278, Arg298, Ser300, Ser302, Gly303, Thr380, Trp381, Ala382, Gly390, Gln391, Arg392, Ala393, Arg394, or Asp397. In some embodiments of the combination of the invention, such antibodies or antigen binding fragments include, but are not limited to, MAb4, MAb5, MAb6, MAb16, MAb18, and Fab22 as disclosed in Table 1.

[0775] Once a desired epitope on an antigen is determined, it is possible to generate antibodies to that epitope, e.g., using the techniques described in the present invention. Alternatively, during the discovery process, the generation and characterization of antibodies may elucidate information about desirable epitopes. From this information, it is then possible to competitively screen antibodies for binding to the same epitope. An approach to achieve this is to conduct cross-competition studies to find antibodies that competitively bind with one another, e.g., the antibodies compete for binding to the antigen. A high throughput process for “binning” antibodies based upon their cross-competition is described in International Patent Application No. WO 2003/48731. As will be appreciated by one of skill in the art, practically anything to which an antibody can specifically bind could be an epitope. An epitope can comprises those residues to which the antibody binds.

[0776] Generally, antibodies specific for a particular target antigen will preferentially recognize an epitope on the target antigen in a complex mixture of proteins and/or macromolecules.

[0777] Regions of a given polypeptide that include an epitope can be identified using any number of epitope mapping techniques, well known in the art. See, e.g., Epitope Mapping Protocols in Methods in Molecular Biology, Vol. 66 (Glenn E. Morris, Ed., 1996, Humana Press, Totowa, N.J). For example, linear epitopes may be determined by e.g., concurrently synthesizing large numbers of peptides on solid supports, the peptides corresponding to portions of the protein molecule, and reacting the peptides with antibodies while the peptides are still attached to the supports. Such techniques are known in the art and described in, e.g., U.S. Pat. No. 4,708,871; Geysen et al., (1984) Proc. Natl. Acad. Sci. USA 8:3998-4002; Geysen et al., (1985) Proc. Natl. Acad. Sci. USA 82:78-182; Geysen et al., (1986) Mol. Immunol. 23:709-715. Similarly, conformational epitopes are readily identified by determining spatial conformation of amino acids such as by, e.g., x-ray crystallography and two-dimensional nuclear magnetic resonance. See, e.g., Epitope Mapping Protocols, supra. Antigenic regions of proteins can also be identified using standard antigenicity and hydropathy plots, such as those calculated using, e.g., the Omiga version 1.0 software program available from the Oxford Molecular Group. This computer program employs the Hopp/Woods method, Hopp et al., (1981) Proc. Natl. Acad. Sci USA 78:3824-3828; for determining antigenicity profiles, and the Kyte-Doolittle technique, Kyte et al., (1982) J. Mol. Biol. 157:105-132; for hydropathy plots.

[0778] The antibody molecule can be a polyclonal or a monoclonal antibody. A monoclonal antibody can be made by hybridoma technology or by methods that do not use hybridoma technology (e.g., recombinant methods). In some embodiments, the antibody can be recombinantly produced, e.g., produced by phage display or by combinatorial methods.

[0779] Phage display and combinatorial methods for generating antibodies are known in the art (as described in, e.g., Ladner et al. U.S. Pat. No. 5,223,409; Kang et al. International Publication No. WO 92/18619; Dower et al. International Publication No. WO 91/17271; Winter et al. International Publication WO 92/20791; Markland et al. International Publication No. WO 92/15679; Breitling et al. International Publication WO 93/01288; McCafferty et al. International Publication No. WO 92/01047; Garrard et al. International Publication No. WO 92/09690; Ladner et al. International Publication No. WO 90/02809; Fuchs et al. (1991) Bio/Technology 9:1370-1372; Hay et al. (1992) Hum Antibod Hybridomas 3:81-85; Huse et al. (1989) Science 246:1275-1281; Griffths et al. (1993) EMBO J 12:725-734; Hawkins et al. (1992) J Mol Biol 226:889-896; Clackson et al. (1991) Nature 352:624-628; Gram et al. (1992) PNAS 89:3576-3580; Garrad et al. (1991) Bio/Technology 9:1373-1377; Hoogenboom et al. (1991) Nuc Acid Res 19:4133-4137; and Barbas et al. (1991) PNAS 88:7978-7982).

[0780] In one embodiment, the antibody is a fully human antibody (e.g., an antibody made in a mouse which has been genetically engineered to produce an antibody from a human immunoglobulin sequence), or a non-human antibody, e.g., a rodent (mouse or rat), goat, primate (e.g., monkey), camel antibody.

[0781] An antibody can be one in which the variable region, or a portion thereof, e.g., the CDRs, are generated in a non-human organism, e.g., a rat or mouse. Chimeric, CDR-grafted, and humanized antibodies are within the invention. Antibodies generated in a non-human organism, e.g., a rat or mouse, and then modified, e.g., in the variable framework or constant region, to decrease antigenicity in a human are within the invention.

[0782] Chimeric and/or humanized antibodies, can be engineered to minimize the immune response by a human patient to antibodies produced in non-human subjects or derived from the expression of non-human antibody genes. Chimeric antibodies comprise a non-human animal antibody variable region and a human antibody constant region. Such antibodies retain the epitope binding specificity of the original monoclonal antibody, but may be less immunogenic when administered to humans, and therefore more likely to be tolerated by the patient. For example, one or all (e.g., one, two, or three) of the variable regions of the light chain(s) and/or one or all (e.g., one, two, or three) of the variable regions the heavy chain(s) of a mouse antibody (e.g., a mouse monoclonal antibody) can each be joined to a human constant region, such as, without limitation an IgG1 human constant region. Chimeric monoclonal antibodies can be produced by recombinant DNA techniques known in the art. For example, a gene encoding the constant region of a non-human antibody molecule can be substituted with a gene encoding a human constant region (see Robinson et al., PCT Patent Publication PCT/US86/02269; Akira, et al., European Patent Application 184,187; or Taniguchi, M., European Patent Application 171,496). In addition, other suitable techniques that can be used to generate chimeric antibodies are described, for example, in U.S. Pat. Nos. 4,816,567; 4,978,775; 4,975,369; and 4,816,397.

[0783] A chimeric antibody can be further “humanized” by replacing portions of the variable region not involved in antigen binding with equivalent portions from human variable regions. Humanized antibodies comprise one or more human framework regions in the variable region together with non-human (e.g., mouse, rat, or hamster) complementarity-determining regions (CDRs) of the heavy and/or light chain. In some embodiments, a humanized antibody comprises sequences that are entirely human except for the CDR regions. Humanized antibodies are typically less immunogenic to humans, relative to non-humanized antibodies, and thus offer therapeutic benefits in certain situations. Humanized ENTPD2 antibodies can be generated using methods known in the art. See for example, Hwang et al., Methods 36:35, 2005; Queen et al., Proc. Natl. Acad. Sci. U.S.A. 86:10029-10033, 1989; Jones et al., Nature 321:522-25, 1986; Riechmann et al., Nature 332:323-27, 1988; Verhoeyen et al., Science 239:1534-36, 1988; Orlandi et al., Proc. Natl. Acad. Sci. U.S.A. 86:3833-3837, 1989; U.S. Pat. Nos. 5,225,539; 5,530,101; 5,585,089; 5,693,761; 5,693,762; and 6,180,370; and WO 90/07861.

[0784] Human ENTPD2 antibodies can be generated using methods that are known in the art. For example, the humaneering technology used to converting non-human antibodies into engineered human antibodies. U.S. Patent Publication No. 20050008625 describes an in vivo method for replacing a nonhuman antibody variable region with a human variable region in an antibody while maintaining the same or providing better binding characteristics relative to that of the nonhuman antibody. The method relies on epitope guided replacement of variable regions of a non-human reference antibody with a fully human antibody. The resulting human antibody is generally structurally unrelated to the reference nonhuman antibody, but binds to the same epitope on the same antigen as the reference antibody. Briefly, the serial epitope-guided complementarity replacement approach is enabled by setting up a competition in cells between a “competitor” and a library of diverse hybrids of the reference antibody (“test antibodies”) for binding to limiting amounts of antigen in the presence of a reporter system which responds to the binding of test antibody to antigen. The competitor can be the reference antibody or derivative thereof such as a single-chain Fv fragment. The competitor can also be a natural or artificial ligand of the antigen which binds to the same epitope as the reference antibody. The only requirements of the competitor are that it binds to the same epitope as the reference antibody, and that it competes with the reference antibody for antigen binding. The test antibodies have one antigen-binding V-region in common from the nonhuman reference antibody, and the other V-region selected at random from a diverse source such as a repertoire library of human antibodies. The common V-region from the reference antibody serves as a guide, positioning the test antibodies on the same epitope on the antigen, and in the same orientation, so that selection is biased toward the highest antigen-binding fidelity to the reference antibody.

[0785] Many types of reporter system can be used to detect desired interactions between test antibodies and antigen. For example, complementing reporter fragments may be linked to antigen and test antibody, respectively, so that reporter activation by fragment complementation only occurs when the test antibody binds to the antigen. When the test antibody- and antigen-reporter fragment fusions are co-expressed with a competitor, reporter activation becomes dependent on the ability of the test antibody to compete with the competitor, which is proportional to the affinity of the test antibody for the antigen. Other reporter systems that can be used include the reactivator of an auto-inhibited reporter reactivation system (RAIR) as disclosed in U.S. patent application Ser. No. 10/208,730 (Publication No. 20030198971), or competitive activation system disclosed in U.S. patent application Ser. No. 10/076,845 (Publication No. 20030157579).

[0786] With the serial epitope-guided complementarity replacement system, selection is made to identify cells expresses a single test antibody along with the competitor, antigen, and reporter components. In these cells, each test antibody competes one-on-one with the competitor for binding to a limiting amount of antigen. Activity of the reporter is proportional to the amount of antigen bound to the test antibody, which in turn is proportional to the affinity of the test antibody for the antigen and the stability of the test antibody. Test antibodies are initially selected on the basis of their activity relative to that of the reference antibody when expressed as the test antibody. The result of the first round of selection is a set of “hybrid” antibodies, each of which is comprised of the same non-human V-region from the reference antibody and a human V-region from the library, and each of which binds to the same epitope on the antigen as the reference antibody. One of more of the hybrid antibodies selected in the first round will have an affinity for the antigen comparable to or higher than that of the reference antibody.

[0787] In the second V-region replacement step, the human V-regions selected in the first step are used as guide for the selection of human replacements for the remaining non-human reference antibody V-region with a diverse library of cognate human V-regions. The hybrid antibodies selected in the first round may also be used as competitors for the second round of selection. The result of the second round of selection is a set of fully human antibodies which differ structurally from the reference antibody, but which compete with the reference antibody for binding to the same antigen. Some of the selected human antibodies bind to the same epitope on the same antigen as the reference antibody. Among these selected human antibodies, one or more binds to the same epitope with an affinity which is comparable to or higher than that of the reference antibody.

[0788] Using a mouse or chimeric ENTPD2 antibody, human antibodies that bind to human ENTPD2 with the same binding specificity and the same or better binding affinity can be generated. In addition, such human ENTPD2 antibodies can also be commercially obtained from companies which customarily produce human antibodies, e.g., KaloBios, Inc. (Mountain View, Calif.).

[0789] In some embodiments of the combination of the present invention, there is an antibody or antigen-binding fragment thereof that binds to human ENTPD2 protein and modulates one or more ENTPD2 activities/functions, e.g., inhibiting the enzymatic actitivies of human ENTPD2, e.g., by at least 40%, at least 50%, at least 60%, at least 70%, at least 80%, or at least 90%. In some embodiments, the enzymatic activity of human ENTPD2 is measured using an in vitro FRET assay which measures the hydrolysis of ATP to ADP by either recombinant ENTPD2 or ENTPD2 expressed on the surface of cells.

[0790] In some embodiments of the combination of the present invention, the anti-human ENTPD2 antibodies or antigen binding fragments thereof described herein inhibit ENTPD2's ability of hydrolysis of adenosine triphosphate (ATP). In some embodiments, ENTPD2's ability of hydrolysis of ATP is measured using an in vitro FRET assay which measures the hydrolysis of ATP to ADP by either recombinant ENTPD2 or ENTPD2 expressed on the surface of cells.

[0791] In some embodiments of the combination of the present invention, the anti-human ENTPD2 antibodies or antigen binding fragments thereof described herein interfere with ATP binding to ENTPD2 or trap ATP within the catalytic domain of ENTPD2. In some embodiments, interference with ATP binding to ENTPD2 or trapping ATP within the catalytic domain of ENTPD2 is measured using an in vitro FRET assay which measures the hydrolysis of ATP to ADP by either recombinant ENTPD2 or ENTPD2 expressed on the surface of cells.

Antibodies and Antigen-Binding Fragments Thereof that Specifically Bind to Mouse ENTPD2

[0792] Also provided herein are antibodies or antigen binding fragments thereof, e.g., monoclonal antibodies or antigen binding fragments thereof, that specifically bind to mouse ENTPD2 protein. Table 23 lists the sequences of exemplary the ENTPD2 antibodies or antigen-binding fragments that specifically bind to mouse ENTPD2 protein.

TABLE 23
Sequences of Exemplary Monoclonal Antibodies (MABs) and
Antibody Fragments (FABs) That Bind Mouse ENTPD2

| | | |
|---|---|---|
| ANTI-mouse | | |
| ENTPD2 MAB13 | | |
| SEQ ID NO: 182 | HCDR1 (KABAT) | HYGMN |
| SEQ ID NO: 183 | HCDR2 (KABAT) | WINTDTGNPTYADDFKG |
| SEQ ID NO: 184 | HCDR3 (KABAT) | YGTLYSGYGFFFDS |
| SEQ ID NO: 185 | HCDR1 (CHOTHIA) | GYTFTHY |
| SEQ ID NO: 186 | HCDR2 (CHOTHIA) | NTDTGN |
| SEQ ID NO: 184 | HCDR3 (CHOTHIA) | YGTLYSGYGFFFDS |
| SEQ ID NO: 187 | HCDR1 | GYTFTHYGMN |
| | (COMBINED) | |
| SEQ ID NO: 183 | HCDR2 | WINTDTGNPTYADDFKG |
| | (COMBINED) | |
| SEQ ID NO: 184 | HCDR3 | YGTLYSGYGFFFDS |
| | (COMBINED) | |
| SEQ ID NO: 188 | HCDR1 (IMGT) | GYTFTHYG |
| SEQ ID NO: 189 | HCDR2 (IMGT) | INTDTGNP |
| SEQ ID NO: 190 | HCDR3 (IMGT) | VRYGTLYSGYGFFFDS |
| SEQ ID NO: 191 | VH | QVQLVQSGAELKQPGQSVKISCKASGYTFTHYGMN |
| | | WVKQAPGQGLKWMGWINTDTGNPTYADDFKGRFVF |
| | | SLDTSVSTAYLQISNLKNEDTATYYCVRYGTLYSG |
| | | YGFFFDSWGQGTLVTVSS |
| SEQ ID NO: 192 | VH DNA | CAGGTCCAGCTGGTGCAGTCAGGAGCTGAGCTGAA |
| | | GCAGCCTGGACAGTCGGTGAAGATCTCCTGCAAGG |
| | | CTTCAGGGTACACCTTCACACACTATGGGATGAAC |
| | | TGGGTGAAGCAGGCACCAGGACAGGGTCTAAAGTG |
| | | GATGGGCTGGATCAACACTGACACTGGGAATCCAA |
| | | CATATGCTGATGACTTCAAAGGACGGTTTGTCTTC |
| | | TCCTTGGACACCTCTGTCAGCACTGCATATCTGCA |
| | | GATCAGCAACCTCAAGAATGAAGACACGGCCACGT |
| | | ATTACTGTGTGAGATATGGAACCCTATATAGCGGA |
| | | TATGGGTTTTTTTTTGATTCCTGGGGCCAAGGGAC |
| | | CCTGGTCACCGTCTCCTCA |
| SEQ ID NO: 193 | HC | QVQLVQSGAELKQPGQSVKISCKASGYTFTHYGMN |
| | | WVKQAPGQGLKWMGWINTDTGNPTYADDFKGRFVF |
| | | SLDTSVSTAYLQISNLKNEDTATYYCVRYGTLYSG |
| | | YGFFFDSWGQGTLVTVSSAKTTAPSVYPLAPVCGD |
| | | TTGSSVTLGCLVKGYFPEPVTLTWNSGSLSSGVHT |
| | | FPAVLQSDLYTLSSSVTVTSSTWPSQSITCNVAHP |
| | | ASSTKVDKKIEPRGPTIKPCPPCKCPAPNLLGGPS |
| | | VFIFPPKIKDVLMISLSPIVTCVVVDVSEDDPDVQ |
| | | ISWFVNNVEVHTAQTQTHREDYNSTLRVVSALPIQ |
| | | HQDWMSGKEFKCKVNNKDLPAPIERTISKPKGSVR |
| | | APQVYVLPPPEEEMTKKQVTLTCMVTDF1V1PEDI |
| | | YVEWTNNGKTELNYKNTEPVLDSDGSYFMYSKLRV |
| | | EKKNWVERNSYSCSVVHEGLHNHHTTKSFSRTPGK |
| SEQ ID NO: 194 | HC DNA | CAGGTCCAGCTGGTGCAGTCAGGAGCTGAGCTGAA |
| | | GCAGCCTGGACAGTCGGTGAAGATCTCCTGCAAGG |
| | | CTTCAGGGTACACCTTCACACACTATGGGATGAAC |
| | | TGGGTGAAGCAGGCACCAGGACAGGGTCTAAAGTG |
| | | GATGGGCTGGATCAACACTGACACTGGGAATCCAA |
| | | CATATGCTGATGACTTCAAAGGACGGTTTGTCTTC |
| | | TCCTTGGACACCTCTGTCAGCACTGCATATCTGCA |
| | | GATCAGCAACCTCAAGAATGAAGACACGGCCACGT |
| | | ATTACTGTGTGAGATATGGAACCCTATATAGCGGA |
| | | TATGGGTTTTTTTTTGATTCCTGGGGCCAAGGGAC |
| | | CCTGGTCACCGTCTCCTCAGCCAAGACCACCGCCC |
| | | CCAGCGTGTACCCCCTGGCCCCCGTGTGCGGCGAT |
| | | ACCACCGGCAGCAGCGTGACCCTGGGCTGCCTGGT |
| | | GAAGGGCTACTTCCCCGAGCCCGTGACCCTGACCT |
| | | GGAACAGCGGCTCCCTGAGCAGCGGCGTGCACACC |
| | | TTCCCCGCCGTGCTGCAGAGCGACCTGTACACCCT |
| | | GTCCAGCTCCGTGACCGTGACAAGCAGCACCTGGC |
| | | CCAGCCAGAGCATCACCTGCAACGTGGCCCACCCC |
| | | GCCAGCAGCACCAAGGTGGACAAGAAGATCGAGCC |
| | | CAGGGGCCCCACCATCAAGCCCTGCCCCCCCTGCA |
| | | AGTGCCCAGCCCCCAACCTGCTGGGCGGACCCAGC |
| | | GTGTTCATCTTCCCCCCCAAGATCAAGGACGTGCT |
| | | GATGATCAGCCTGAGCCCCATCGTGACCTGCGTGG |
| | | TGGTGGACGTGAGCGAGGACGACCCCGACGTGCAG |
| | | ATCAGCTGGTTCGTGAACAACGTGGAGGTGCACAC |
| | | CGCCCAGACCCAGACCCACCGGGAGGACTACAACA |
| | | GCACCCTGCGCGTCGTGTCCGCCCTGCCCATCCAG |
| | | CACCAGGACTGGATGAGCGGCAAAGAATTCAAGTG |
| | | CAAGGTGAACAACAAGGACCTGCCTGCCCCCATCG |
| | | AGCGGACCATCAGCAAGCCCAAGGGCAGCGTGAGA |
| | | GCCCCCCAGGTGTACGTGCTGCCCCCTCCCGAGGA |
| | | AGAGATGACCAAGAAACAGGTGACACTGACCTGCA |
| | | TGGTGACCGACTTCATGCCCGAGGACATCTACGTG |
| | | GAGTGGACCAACAACGGCAAGACCGAGCTGAACTA |
| | | CAAGAACACCGAGCCTGTGCTGGACAGCGACGGCA |
| | | GCTACTTCATGTACAGCAAGCTGCGGGTGGAGAAG |
| | | AAAAACTGGGTGGAGCGGAACAGCTACAGCTGCAG |
| | | CGTGGTGCACGAGGGCCTGCACAACCACCACACCA |
| | | CCAAGAGCTTCAGCCGGACCCCCGGCAAG |
| SEQ ID NO: 195 | LCDR1 (KABAT) | KSSQSLFNSNTNKNYLN |
| SEQ ID NO: 196 | LCDR2 (KABAT) | YASTRHT |
| SEQ ID NO: 197 | LCDR3 (KABAT) | QQWYSYPWT |
| SEQ ID NO: 198 | LCDR1 (CHOTHIA) | SQSLFNSNTNKNY |
| SEQ ID NO: 199 | LCDR2 (CHOTHIA) | YAS |
| SEQ ID NO: 200 | LCDR3 (CHOTHIA) | WYSYPW |
| SEQ ID NO: 195 | LCDR1 | KSSQSLFNSNTNKNYLN |
| | (COMBINED) | |
| SEQ ID NO: 196 | LCDR2 | YASTRHT |
| | (COMBINED) | |
| SEQ ID NO: 197 | LCDR3 | QQWYSYPWT |
| | (COMBINED) | |
| SEQ ID NO: 201 | LCDR1 (IMGT) | QSLFNSNTNKNY |
| SEQ ID NO: 199 | LCDR2 (IMGT) | YAS |
| SEQ ID NO: 197 | LCDR3 (IMGT) | QQWYSYPWT |
| SEQ ID NO: 202 | VL | DIMMTQSPSSLSVSAGEKATITCKSSQSLFNSNTN |
| | | KNYLNWYLQKPGQSPKLLFYYASTRHTGVPDRFIG |
| | | SGSGTDFTLTITSVQDEDLADYYCQQWYSYPWTFG |
| | | PGTKLEIK |
| SEQ ID NO: 203 | VL DNA | GACATCATGATGACCCAGTCTCCATCATCCCTGAG |
| | | TGTGTCAGCAGGAGAGAAAGCCACTATCACCTGCA |
| | | AGTCCAGTCAGAGTCTTTTCAACAGTAACACCAAC |
| | | AAGAACTACTTGAACTGGTACCTGCAGAAACCAGG |
| | | GCAGTCTCCTAAACTGCTGTTCTATTATGCATCCA |
| | | CTAGGCATACTGGGGTCCCTGATCGCTTCATAGGC |
| | | AGTGGATCTGGGACAGATTTCACTCTCACCATCAC |
| | | CAGTGTCCAGGATGAAGACCTGGCAGATTATTACT |
| | | GTCAGCAGTGGTATAGCTACCCGTGGACGTTCGGA |
| | | CCTGGCACCAAGCTGGAAATCAAA |
| SEQ ID NO: 204 | LC | DIMMTQSPSSLSVSAGEKATITCKSSQSLFNSNTN |
| | | KNYLNWYLQKPGQSPKLLFYYASTRHTGVPDRFIG |
| | | SGSGTDFTLTITSVQDEDLADYYCQQWYSYPWTFG |
| | | PGTKLEIKRADAAPTVSIFPPSSEQLTSGGASVVC |
| | | FLNNFYPKDINVKWKIDGSERQNGVLNSWTDQDSK |
| | | DSTYSMSSTLTLTKDEYERHNSYTCEATHKTSTSP |
| | | IVKSFNRNEC |
| SEQ ID NO: 205 | LC DNA | GACATCATGATGACCCAGTCTCCATCATCCCTGAG |
| | | TGTGTCAGCAGGAGAGAAAGCCACTATCACCTGCA |
| | | AGTCCAGTCAGAGTCTTTTCAACAGTAACACCAAC |
| | | AAGAACTACTTGAACTGGTACCTGCAGAAACCAGG |
| | | GCAGTCTCCTAAACTGCTGTTCTATTATGCATCCA |
| | | CTAGGCATACTGGGGTCCCTGATCGCTTCATAGGC |
| | | AGTGGATCTGGGACAGATTTCACTCTCACCATCAC |
| | | CAGTGTCCAGGATGAAGACCTGGCAGATTATTACT |
| | | GTCAGCAGTGGTATAGCTACCCGTGGACGTTCGGA |
| | | CCTGGCACCAAGCTGGAAATCAAACGCGCTGATGC |
| | | CGCCCCTACCGTGAGCATCTTCCCCCCCAGCAGCG |
| | | AGCAGCTGACCAGCGGCGGAGCCAGCGTGGTGTGC |
| | | TTCCTGAACAACTTCTACCCCAAGGACATCAACGT |
| | | GAAGTGGAAGATCGACGGCAGCGAGCGGCAGAACG |
| | | GCGTGCTGAACAGCTGGACCGACCAGGACAGCAAG |
| | | GACTCCACCTACAGCATGAGCAGCACCCTGACCCT |
| | | GACCAAGGACGAGTACGAGCGGCACAACAGCTACA |
| | | CCTGCGAGGCCACCCACAAGACCAGCACCAGCCCC |
| | | ATCGTGAAGAGCTTCAACCGGAACGAGTGC |
| ANTI-mouse | | |
| ENTPD2 MAB14 | | |
| SEQ ID NO: 182 | HCDR1 (KABAT) | HYGMN |
| SEQ ID NO: 183 | HCDR2 (KABAT) | WINTDTGNPTYADDFKG |
| SEQ ID NO: 184 | HCDR3 (KABAT) | YGTLYSGYGFFFDS |
| SEQ ID NO: 206 | HCDR1 (CHOTHIA) | GYTF WHY |
| SEQ ID NO: 186 | HCDR2 (CHOTHIA) | NTDTGN |
| SEQ ID NO: 184 | HCDR3 (CHOTHIA) | YGTLYSGYGFFFDS |
| SEQ ID NO: 207 | HCDR1 | GYTFWHYGMN |
| | (COMBINED) | |
| SEQ ID NO: 183 | HCDR2 | WINTDTGNPTYADDFKG |
| | (COMBINED) | |
| SEQ ID NO: 184 | HCDR3 | YGTLYSGYGFFFDS |
| | (COMBINED) | |
| SEQ ID NO: 208 | HCDR1 (IMGT) | GYTFWHYG |
| SEQ ID NO: 189 | HCDR2 (IMGT) | INTDTGNP |
| SEQ ID NO: 190 | HCDR3 (IMGT) | VRYGTLYSGYGFFFDS |
| SEQ ID NO: 209 | VH | QVQLVQSGAELKQPGQSVKISCKASGYTFWHYGMN |
| | | WVKQAPGQGLKWMGWINTDTGNPTYADDFKGRFVF |
| | | SLDTSVSTAYLQISNLKNEDTATYYCVRYGTLYSG |
| | | YGFFFDSWGQGTLVTVSS |
| SEQ ID NO: 210 | VH DNA | CAGGTCCAGCTGGTGCAGTCAGGAGCTGAGCTGAA |
| | | GCAGCCTGGACAGTCGGTGAAGATCTCCTGCAAGG |
| | | CTTCAGGGTACACCTTCTGGCACTATGGGATGAAC |
| | | TGGGTGAAGCAGGCACCAGGACAGGGTCTAAAGTG |
| | | GATGGGCTGGATCAACACTGACACTGGGAATCCAA |
| | | CATATGCTGATGACTTCAAAGGACGGTTTGTCTTC |
| | | TCCTTGGACACCTCTGTCAGCACTGCATATCTGCA |
| | | GATCAGCAACCTCAAGAATGAAGACACGGCCACGT |
| | | ATTACTGTGTGAGATATGGAACCCTATATAGCGGA |
| | | TATGGGTTTTTTTTTGATTCCTGGGGCCAAGGGAC |
| | | CCTGGTCACCGTCTCCTCA |
| SEQ ID NO: 211 | HC | QVQLVQSGAELKQPGQSVKISCKASGYTFWHYGMN |
| | | WVKQAPGQGLKWMGWINTDTGNPTYADDFKGRFVF |
| | | SLDTSVSTAYLQISNLKNEDTATYYCVRYGTLYSG |
| | | YGFFFDSWGQGTLVTVSSAKTTAPSVYPLAPVCGD |
| | | TTGSSVTLGCLVKGYFPEPVTLTWNSGSLSSGVHT |
| | | FPAVLQSDLYTLSSSVTVTSSTWPSQSITCNVAHP |
| | | ASSTKVDKKIEPRGPTIKPCPPCKCPAPNLLGGPS |
| | | VFIFPPKIKDVLMISLSPIVTCVVVDVSEDDPDVQ |
| | | ISWFVNNVEVHTAQTQTHREDYNSTLRVVSALPIQ |
| | | HQDWMSGKEFKCKVNNKDLPAPIERTISKPKGSVR |
| | | APQVYVLPPPEEEMTKKQVTLTCMVTDF1VIPEDI |
| | | YVEWTNNGKTELNYKNTEPVLDSDGSYFMYSKLRV |
| | | EKKNWVERNSYSCSVVHEGLHNHHTTKSFSRTPGK |
| SEQ ID NO: 212 | HC DNA | CAGGTCCAGCTGGTGCAGTCAGGAGCTGAGCTGAA |
| | | GCAGCCTGGACAGTCGGTGAAGATCTCCTGCAAGG |
| | | CTTCAGGGTACACCTTCTGGCACTATGGGATGAAC |
| | | TGGGTGAAGCAGGCACCAGGACAGGGTCTAAAGTG |
| | | GATGGGCTGGATCAACACTGACACTGGGAATCCAA |
| | | CATATGCTGATGACTTCAAAGGACGGTTTGTCTTC |
| | | TCCTTGGACACCTCTGTCAGCACTGCATATCTGCA |
| | | GATCAGCAACCTCAAGAATGAAGACACGGCCACGT |
| | | ATTACTGTGTGAGATATGGAACCCTATATAGCGGA |
| | | TATGGGTTTTTTTTTGATTCCTGGGGCCAAGGGAC |
| | | CCTGGTCACCGTCTCCTCAGCCAAGACCACCGCCC |
| | | CCAGCGTGTACCCCCTGGCCCCCGTGTGCGGCGAT |
| | | ACCACCGGCAGCAGCGTGACCCTGGGCTGCCTGGT |
| | | GAAGGGCTACTTCCCCGAGCCCGTGACCCTGACCT |
| | | GGAACAGCGGCTCCCTGAGCAGCGGCGTGCACACC |
| | | TTCCCCGCCGTGCTGCAGAGCGACCTGTACACCCT |
| | | GTCCAGCTCCGTGACCGTGACAAGCAGCACCTGGC |
| | | CCAGCCAGAGCATCACCTGCAACGTGGCCCACCCC |
| | | GCCAGCAGCACCAAGGTGGACAAGAAGATCGAGCC |
| | | CAGGGGCCCCACCATCAAGCCCTGCCCCCCCTGCA |
| | | AGTGCCCAGCCCCCAACCTGCTGGGCGGACCCAGC |
| | | GTGTTCATCTTCCCCCCCAAGATCAAGGACGTGCT |
| | | GATGATCAGCCTGAGCCCCATCGTGACCTGCGTGG |
| | | TGGTGGACGTGAGCGAGGACGACCCCGACGTGCAG |
| | | ATCAGCTGGTTCGTGAACAACGTGGAGGTGCACAC |
| | | CGCCCAGACCCAGACCCACCGGGAGGACTACAACA |
| | | GCACCCTGCGCGTCGTGTCCGCCCTGCCCATCCAG |
| | | CACCAGGACTGGATGAGCGGCAAAGAATTCAAGTG |
| | | CAAGGTGAACAACAAGGACCTGCCTGCCCCCATCG |
| | | AGCGGACCATCAGCAAGCCCAAGGGCAGCGTGAGA |
| | | GCCCCCCAGGTGTACGTGCTGCCCCCTCCCGAGGA |
| | | AGAGATGACCAAGAAACAGGTGACACTGACCTGCA |
| | | TGGTGACCGACTTCATGCCCGAGGACATCTACGTG |
| | | GAGTGGACCAACAACGGCAAGACCGAGCTGAACTA |
| | | CAAGAACACCGAGCCTGTGCTGGACAGCGACGGCA |
| | | GCTACTTCATGTACAGCAAGCTGCGGGTGGAGAAG |
| | | AAAAACTGGGTGGAGCGGAACAGCTACAGCTGCAG |
| | | CGTGGTGCACGAGGGCCTGCACAACCACCACACCA |
| | | CCAAGAGCTTCAGCCGGACCCCCGGCAAG |
| SEQ ID NO: 195 | LCDR1 (KABAT) | KSSQSLFNSNTNKNYLN |
| SEQ ID NO: 196 | LCDR2 (KABAT) | YASTRHT |
| SEQ ID NO: 197 | LCDR3 (KABAT) | QQWYSYPWT |
| SEQ ID NO: 198 | LCDR1 (CHOTHIA) | SQSLFNSNTNKNY |
| SEQ ID NO: 199 | LCDR2 (CHOTHIA) | YAS |
| SEQ ID NO: 200 | LCDR3 (CHOTHIA) | WYSYPW |
| SEQ ID NO: 195 | LCDR1 | KSSQSLFNSNTNKNYLN |
| | (COMBINED) | |
| SEQ ID NO: 196 | LCDR2 | YASTRHT |
| | (COMBINED) | |
| SEQ ID NO: 197 | LCDR3 | QQWYSYPWT |
| | (COMBINED) | |
| SEQ ID NO: 201 | LCDR1 (IMGT) | QSLFNSNTNKNY |
| SEQ ID NO: 199 | LCDR2 (IMGT) | YAS |
| SEQ ID NO: 197 | LCDR3 (IMGT) | QQWYSYPWT |
| SEQ ID NO: 202 | VL | DIMMTQSPSSLSVSAGEKATITCKSSQSLFNSNTN |
| | | KNYLNWYLQKPGQSPKLLFYYASTRHTGVPDRFIG |
| | | SGSGTDFTLTITSVQDEDLADYYCQQWYSYPWTFG |
| | | PGTKLEIK |
| SEQ ID NO: 203 | VL DNA | GACATCATGATGACCCAGTCTCCATCATCCCTGAG |
| | | TGTGTCAGCAGGAGAGAAAGCCACTATCACCTGCA |
| | | AGTCCAGTCAGAGTCTTTTCAACAGTAACACCAAC |
| | | AAGAACTACTTGAACTGGTACCTGCAGAAACCAGG |
| | | GCAGTCTCCTAAACTGCTGTTCTATTATGCATCCA |
| | | CTAGGCATACTGGGGTCCCTGATCGCTTCATAGGC |
| | | AGTGGATCTGGGACAGATTTCACTCTCACCATCAC |
| | | CAGTGTCCAGGATGAAGACCTGGCAGATTATTACT |
| | | GTCAGCAGTGGTATAGCTACCCGTGGACGTTCGGA |
| | | CCTGGCACCAAGCTGGAAATCAAA |
| SEQ ID NO: 204 | LC | DIMMTQSPSSLSVSAGEKATITCKSSQSLFNSNTN |
| | | KNYLNWYLQKPGQSPKLLFYYASTRHTGVPDRFIG |
| | | SGSGTDFTLTITSVQDEDLADYYCQQWYSYPWTFG |
| | | PGTKLEIKRADAAPTVSIFPPSSEQLTSGGASVVC |
| | | FLNNFYPKDINVKWKIDGSERQNGVLNSWTDQDSK |
| | | DSTYSMSSTLTLTKDEYERHNSYTCEATHKTSTSP |
| | | IVKSFNRNEC |
| SEQ ID NO: 205 | LC DNA | GACATCATGATGACCCAGTCTCCATCATCCCTGAG |
| | | TGTGTCAGCAGGAGAGAAAGCCACTATCACCTGCA |
| | | AGTCCAGTCAGAGTCTTTTCAACAGTAACACCAAC |
| | | AAGAACTACTTGAACTGGTACCTGCAGAAACCAGG |
| | | GCAGTCTCCTAAACTGCTGTTCTATTATGCATCCA |
| | | CTAGGCATACTGGGGTCCCTGATCGCTTCATAGGC |
| | | AGTGGATCTGGGACAGATTTCACTCTCACCATCAC |
| | | CAGTGTCCAGGATGAAGACCTGGCAGATTATTACT |
| | | GTCAGCAGTGGTATAGCTACCCGTGGACGTTCGGA |
| | | CCTGGCACCAAGCTGGAAATCAAACGCGCTGATGC |
| | | CGCCCCTACCGTGAGCATCTTCCCCCCCAGCAGCG |
| | | AGCAGCTGACCAGCGGCGGAGCCAGCGTGGTGTGC |
| | | TTCCTGAACAACTTCTACCCCAAGGACATCAACGT |
| | | GAAGTGGAAGATCGACGGCAGCGAGCGGCAGAACG |
| | | GCGTGCTGAACAGCTGGACCGACCAGGACAGCAAG |
| | | GACTCCACCTACAGCATGAGCAGCACCCTGACCCT |
| | | GACCAAGGACGAGTACGAGCGGCACAACAGCTACA |
| | | CCTGCGAGGCCACCCACAAGACCAGCACCAGCCCC |
| | | ATCGTGAAGAGCTTCAACCGGAACGAGTGC |
| ANTI-mouse | | |
| ENTPD2 MAB15 | | |
| SEQ ID NO: 182 | HCDR1 (KABAT) | HYGMN |
| SEQ ID NO: 183 | HCDR2 (KABAT) | WINTDTGNPTYADDFKG |
| SEQ ID NO: 184 | HCDR3 (KABAT) | YGTLYSGYGFFFDS |
| SEQ ID NO: 213 | HCDR1 (CHOTHIA) | GYTFHHY |
| SEQ ID NO: 186 | HCDR2 (CHOTHIA) | NTDTGN |
| SEQ ID NO: 184 | HCDR3 (CHOTHIA) | YGTLYSGYGFFFDS |
| SEQ ID NO: 214 | HCDR1 | |
| | (COMBINED) | GYTFHHYGMN |
| SEQ ID NO: 183 | HCDR2 | |
| | (COMBINED) | WINTDTGNPTYADDFKG |
| SEQ ID NO: 184 | HCDR3 | |
| | (COMBINED) | YGTLYSGYGFFFDS |
| SEQ ID NO: 215 | HCDR1 (IMGT) | GYTFHHYG |
| SEQ ID NO: 189 | HCDR2 (IMGT) | INTDTGNP |
| SEQ ID NO: 190 | HCDR3 (IMGT) | VRYGTLYSGYGFFFDS |
| SEQ ID NO: 216 | VH | QVQLVQSGAELKQPGQSVKISCKASGYTFHHYGMN |
| | | WVKQAPGQGLKWMGWINTDTGNPTYADDFKGRFVF |
| | | SLDTSVSTAYLQISNLKNEDTATYYCVRYGTLYSG |
| | | YGFFFDSWGQGTLVTVSS |
| SEQ ID NO: 217 | VH DNA | CAGGTCCAGCTGGTGCAGTCAGGAGCTGAGCTGAA |
| | | GCAGCCTGGACAGTCGGTGAAGATCTCCTGCAAGG |
| | | CTTCAGGGTACACCTTCCACCACTATGGGATGAAC |
| | | TGGGTGAAGCAGGCACCAGGACAGGGTCTAAAGTG |
| | | GATGGGCTGGATCAACACTGACACTGGGAATCCAA |
| | | CATATGCTGATGACTTCAAAGGACGGTTTGTCTTC |
| | | TCCTTGGACACCTCTGTCAGCACTGCATATCTGCA |
| | | GATCAGCAACCTCAAGAATGAAGACACGGCCACGT |
| | | ATTACTGTGTGAGATATGGAACCCTATATAGCGGA |
| | | TATGGGTTTTTTTTTGATTCCTGGGGCCAAGGGAC |
| | | CCTGGTCACCGTCTCCTCA |
| SEQ ID NO: 218 | HC | QVQLVQSGAELKQPGQSVKISCKASGYTFHHYGMN |
| | | WVKQAPGQGLKWMGWINTDTGNPTYADDFKGRFVF |
| | | SLDTSVSTAYLQISNLKNEDTATYYCVRYGTLYSG |
| | | YGFFFDSWGQGTLVTVSSAKTTAPSVYPLAPVCGD |
| | | TTGSSVTLGCLVKGYFPEPVTLTWNSGSLSSGVHT |
| | | FPAVLQSDLYTLSSSVTVTSSTWPSQSITCNVAHP |
| | | ASSTKVDKKIEPRGPTIKPCPPCKCPAPNLLGGPS |
| | | VFIFPPKIKDVLMISLSPIVTCVVVDVSEDDPDVQ |
| | | ISWFVNNVEVHTAQTQTHREDYNSTLRVVSALPIQ |
| | | HQDWMSGKEFKCKVNNKDLPAPIERTISKPKGSVR |
| | | APQVYVLPPPEEEMTKKQVTLTCMVTDF1V1PEDI |
| | | YVEWTNNGKTELNYKNTEPVLDSDGSYFMYSKLRV |
| | | EKKNWVERNSYSCSVVHEGLHNHHTTKSFSRTPGK |
| SEQ ID NO: 219 | HC DNA | CAGGTCCAGCTGGTGCAGTCAGGAGCTGAGCTGAA |
| | | GCAGCCTGGACAGTCGGTGAAGATCTCCTGCAAGG |
| | | CTTCAGGGTACACCTTCCACCACTATGGGATGAAC |
| | | TGGGTGAAGCAGGCACCAGGACAGGGTCTAAAGTG |
| | | GATGGGCTGGATCAACACTGACACTGGGAATCCAA |
| | | CATATGCTGATGACTTCAAAGGACGGTTTGTCTTC |
| | | TCCTTGGACACCTCTGTCAGCACTGCATATCTGCA |
| | | GATCAGCAACCTCAAGAATGAAGACACGGCCACGT |
| | | ATTACTGTGTGAGATATGGAACCCTATATAGCGGA |
| | | TATGGGTTTTTTTTTGATTCCTGGGGCCAAGGGAC |
| | | CCTGGTCACCGTCTCCTCAGCCAAGACCACCGCCC |
| | | CCAGCGTGTACCCCCTGGCCCCCGTGTGCGGCGAT |
| | | ACCACCGGCAGCAGCGTGACCCTGGGCTGCCTGGT |
| | | GAAGGGCTACTTCCCCGAGCCCGTGACCCTGACCT |
| | | GGAACAGCGGCTCCCTGAGCAGCGGCGTGCACACC |
| | | TTCCCCGCCGTGCTGCAGAGCGACCTGTACACCCT |
| | | GTCCAGCTCCGTGACCGTGACAAGCAGCACCTGGC |
| | | CCAGCCAGAGCATCACCTGCAACGTGGCCCACCCC |
| | | GCCAGCAGCACCAAGGTGGACAAGAAGATCGAGCC |
| | | CAGGGGCCCCACCATCAAGCCCTGCCCCCCCTGCA |
| | | AGTGCCCAGCCCCCAACCTGCTGGGCGGACCCAGC |
| | | GTGTTCATCTTCCCCCCCAAGATCAAGGACGTGCT |
| | | GATGATCAGCCTGAGCCCCATCGTGACCTGCGTGG |
| | | TGGTGGACGTGAGCGAGGACGACCCCGACGTGCAG |
| | | ATCAGCTGGTTCGTGAACAACGTGGAGGTGCACAC |
| | | CGCCCAGACCCAGACCCACCGGGAGGACTACAACA |
| | | GCACCCTGCGCGTCGTGTCCGCCCTGCCCATCCAG |
| | | CACCAGGACTGGATGAGCGGCAAAGAATTCAAGTG |
| | | CAAGGTGAACAACAAGGACCTGCCTGCCCCCATCG |
| | | AGCGGACCATCAGCAAGCCCAAGGGCAGCGTGAGA |
| | | GCCCCCCAGGTGTACGTGCTGCCCCCTCCCGAGGA |
| | | AGAGATGACCAAGAAACAGGTGACACTGACCTGCA |
| | | TGGTGACCGACTTCATGCCCGAGGACATCTACGTG |
| | | GAGTGGACCAACAACGGCAAGACCGAGCTGAACTA |
| | | CAAGAACACCGAGCCTGTGCTGGACAGCGACGGCA |
| | | GCTACTTCATGTACAGCAAGCTGCGGGTGGAGAAG |
| | | AAAAACTGGGTGGAGCGGAACAGCTACAGCTGCAG |
| | | CGTGGTGCACGAGGGCCTGCACAACCACCACACCA |
| | | CCAAGAGCTTCAGCCGGACCCCCGGCAAG |
| SEQ ID NO: 195 | LCDR1 (KABAT) | KSSQSLFNSNTNKNYLN |
| SEQ ID NO: 196 | LCDR2 (KABAT) | YASTRHT |
| SEQ ID NO: 197 | LCDR3 (KABAT) | QQWYSYPWT |
| SEQ ID NO: 198 | LCDR1 (CHOTHIA) | SQSLFNSNTNKNY |
| SEQ ID NO: 199 | LCDR2 (CHOTHIA) | YAS |
| SEQ ID NO: 200 | LCDR3 (CHOTHIA) | WYSYPW |
| SEQ ID NO: 195 | LCDR1 | KSSQSLFNSNTNKNYLN |
| | (COMBINED) | |
| SEQ ID NO: 196 | LCDR2 | YASTRHT |
| | (COMBINED) | |
| SEQ ID NO: 197 | LCDR3 | QQWYSYPWT |
| | (COMBINED) | |
| SEQ ID NO: 201 | LCDR1 (IMGT) | QSLFNSNTNKNY |
| SEQ ID NO: 199 | LCDR2 (IMGT) | YAS |
| SEQ ID NO: 197 | LCDR3 (IMGT) | QQWYSYPWT |
| SEQ ID NO: 202 | VL | DIMMTQSPSSLSVSAGEKATITCKSSQSLFNSNTN |
| | | KNYLNWYLQKPGQSPKLLFYYASTRHTGVPDRFIG |
| | | SGSGTDFTLTITSVQDEDLADYYCQQWYSYPWTFG |
| | | PGTKLEIK |
| SEQ ID NO: 203 | VL DNA | GACATCATGATGACCCAGTCTCCATCATCCCTGAG |
| | | TGTGTCAGCAGGAGAGAAAGCCACTATCACCTGCA |
| | | AGTCCAGTCAGAGTCTTTTCAACAGTAACACCAAC |
| | | AAGAACTACTTGAACTGGTACCTGCAGAAACCAGG |
| | | GCAGTCTCCTAAACTGCTGTTCTATTATGCATCCA |
| | | CTAGGCATACTGGGGTCCCTGATCGCTTCATAGGC |
| | | AGTGGATCTGGGACAGATTTCACTCTCACCATCAC |
| | | CAGTGTCCAGGATGAAGACCTGGCAGATTATTACT |
| | | GTCAGCAGTGGTATAGCTACCCGTGGACGTTCGGA |
| | | CCTGGCACCAAGCTGGAAATCAAA |
| SEQ ID NO: 204 | LC | DIMMTQSPSSLSVSAGEKATITCKSSQSLFNSNTN |
| | | KNYLNWYLQKPGQSPKLLFYYASTRHTGVPDRFIG |
| | | SGSGTDFTLTITSVQDEDLADYYCQQWYSYPWTFG |
| | | PGTKLEIKRADAAPTVSIFPPSSEQLTSGGASVVC |
| | | FLNNFYPKDINVKWKIDGSERQNGVLNSWTDQDSK |
| | | DSTYSMSSTLTLTKDEYERHNSYTCEATHKTSTSP |
| | | IVKSFNRNEC |
| SEQ ID NO: 205 | LC DNA | GACATCATGATGACCCAGTCTCCATCATCCCTGAG |
| | | TGTGTCAGCAGGAGAGAAAGCCACTATCACCTGCA |
| | | AGTCCAGTCAGAGTCTTTTCAACAGTAACACCAAC |
| | | AAGAACTACTTGAACTGGTACCTGCAGAAACCAGG |
| | | GCAGTCTCCTAAACTGCTGTTCTATTATGCATCCA |
| | | CTAGGCATACTGGGGTCCCTGATCGCTTCATAGGC |
| | | AGTGGATCTGGGACAGATTTCACTCTCACCATCAC |
| | | CAGTGTCCAGGATGAAGACCTGGCAGATTATTACT |
| | | GTCAGCAGTGGTATAGCTACCCGTGGACGTTCGGA |
| | | CCTGGCACCAAGCTGGAAATCAAACGCGCTGATGC |
| | | CGCCCCTACCGTGAGCATCTTCCCCCCCAGCAGCG |
| | | AGCAGCTGACCAGCGGCGGAGCCAGCGTGGTGTGC |
| | | TTCCTGAACAACTTCTACCCCAAGGACATCAACGT |
| | | GAAGTGGAAGATCGACGGCAGCGAGCGGCAGAACG |
| | | GCGTGCTGAACAGCTGGACCGACCAGGACAGCAAG |
| | | GACTCCACCTACAGCATGAGCAGCACCCTGACCCT |
| | | GACCAAGGACGAGTACGAGCGGCACAACAGCTACA |
| | | CCTGCGAGGCCACCCACAAGACCAGCACCAGCCCC |
| | | ATCGTGAAGAGCTTCAACCGGAACGAGTGC |
| ANTI-mouse | | |
| ENTPD2 FAB24 | | |
| SEQ ID NO: 182 | HCDR1 (KABAT) | HYGMN |
| SEQ ID NO: 183 | HCDR2 (KABAT) | WINTDTGNPTYADDFKG |
| SEQ ID NO: 184 | HCDR3 (KABAT) | YGTLYSGYGFFFDS |
| SEQ ID NO: 185 | HCDR1 (CHOTHIA) | GYTFTHY |
| SEQ ID NO: 186 | HCDR2 (CHOTHIA) | NTDTGN |
| SEQ ID NO: 184 | HCDR3 (CHOTHIA) | YGTLYSGYGFFFDS |
| SEQ ID NO: 187 | HCDR1 | GYTFTHYGMN |
| | (COMBINED) | |
| SEQ ID NO: 183 | HCDR2 | WINTDTGNPTYADDFKG |
| | (COMBINED) | |
| SEQ ID NO: 184 | HCDR3 | YGTLYSGYGFFFDS |
| | (COMBINED) | |
| SEQ ID NO: 188 | HCDR1 (IMGT) | GYTFTHYG |
| SEQ ID NO: 189 | HCDR2 (IMGT) | INTDTGNP |
| SEQ ID NO: 190 | HCDR3 (IMGT) | VRYGTLYSGYGFFFDS |
| SEQ ID NO: 191 | VH | QVQLVQSGAELKQPGQSVKISCKASGYTFTHYGMN |
| | | WVKQAPGQGLKWMGWINTDTGNPTYADDFKGRFVF |
| | | SLDTSVSTAYLQISNLKNEDTATYYCVRYGTLYSG |
| | | YGFFFDSWGQGTLVTVSS |
| SEQ ID NO: 192 | VH DNA | CAGGTCCAGCTGGTGCAGTCAGGAGCTGAGCTGAA |
| | | GCAGCCTGGACAGTCGGTGAAGATCTCCTGCAAGG |
| | | CTTCAGGGTACACCTTCACACACTATGGGATGAAC |
| | | TGGGTGAAGCAGGCACCAGGACAGGGTCTAAAGTG |
| | | GATGGGCTGGATCAACACTGACACTGGGAATCCAA |
| | | CATATGCTGATGACTTCAAAGGACGGTTTGTCTTC |
| | | TCCTTGGACACCTCTGTCAGCACTGCATATCTGCA |
| | | GATCAGCAACCTCAAGAATGAAGACACGGCCACGT |
| | | ATTACTGTGTGAGATATGGAACCCTATATAGCGGA |
| | | TATGGGTTTTTTTTTGATTCCTGGGGCCAAGGGAC |
| | | CCTGGTCACCGTCTCCTCA |
| SEQ ID NO: 338 | HC | QVQLVQSGAELKQPGQSVKISCKASGYTFTHYGMN |
| | | WVKQAPGQGLKWMGWINTDTGNPTYADDFKGRFVF |
| | | SLDTSVSTAYLQISNLKNEDTATYYCVRYGTLYSG |
| | | YGFFFDSWGQGTLVTVSSASTKGPSVFPLAPSSKS |
| | | TSGGTAALGCLVKDYFPEPVTVSWNSGALTSGVHT |
| | | FPAVLQSSGLYSLSSVVTVPSSSLGTQTYICNVNH |
| | | KPSNTKVDKRVEPKSC |
| SEQ ID NO: 339 | HC DNA | CAGGTCCAGCTGGTGCAGTCAGGAGCTGAGCTGAA |
| | | GCAGCCTGGACAGTCGGTGAAGATCTCCTGCAAGG |
| | | CTTCAGGGTACACCTTCACACACTATGGGATGAAC |
| | | TGGGTGAAGCAGGCACCAGGACAGGGTCTAAAGTG |
| | | GATGGGCTGGATCAACACTGACACTGGGAATCCAA |
| | | CATATGCTGATGACTTCAAAGGACGGTTTGTCTTC |
| | | TCCTTGGACACCTCTGTCAGCACTGCATATCTGCA |
| | | GATCAGCAACCTCAAGAATGAAGACACGGCCACGT |
| | | ATTACTGTGTGAGATATGGAACCCTATATAGCGGA |
| | | TATGGGTTTTTTTTTGATTCCTGGGGCCAAGGGAC |
| | | CCTGGTCACCGTCTCCTCAgctagcaccaagggcc |
| | | caagtgtgtttcccctggcccccagcagcaagtct |
| | | acttccggcggaactgctgccctgggttgcctggt |
| | | gaaggactacttccccgagcccgtgacagtgtcct |
| | | ggaactctggggctctgacttccggcgtgcacacc |
| | | ttccccgccgtgctgcagagcagcggcctgtacag |
| | | cctgagcagcgtggtgacagtgccctccagctctc |
| | | tgggaacccagacctatatctgcaacgtgaaccac |
| | | aagcccagcaacaccaaggtggacaagagagtgga |
| | | gcccaagagctgc |
| SEQ ID NO: 195 | LCDR1 (KABAT) | KSSQSLFNSNTNKNYLN |
| SEQ ID NO: 196 | LCDR2 (KABAT) | YASTRHT |
| SEQ ID NO: 197 | LCDR3 (KABAT) | QQWYSYPWT |
| SEQ ID NO: 198 | LCDR1 (CHOTHIA) | SQSLFNSNTNKNY |
| SEQ ID NO: 199 | LCDR2 (CHOTHIA) | YAS |
| SEQ ID NO: 200 | LCDR3 (CHOTHIA) | WYSYPW |
| SEQ ID NO: 195 | LCDR1 | KSSQSLFNSNTNKNYLN |
| | (COMBINED) | |
| SEQ ID NO: 196 | LCDR2 | YASTRHT |
| | (COMBINED) | |
| SEQ ID NO: 197 | LCDR3 | QQWYSYPWT |
| | (COMBINED) | |
| SEQ ID NO: 201 | LCDR1 (IMGT) | QSLFNSNTNKNY |
| SEQ ID NO: 199 | LCDR2 (IMGT) | YAS |
| SEQ ID NO: 197 | LCDR3 (IMGT) | QQWYSYPWT |
| SEQ ID NO: 202 | VL | DIMMTQSPSSLSVSAGEKATITCKSSQSLFNSNTN |
| | | KNYLNWYLQKPGQSPKLLFYYASTRHTGVPDRFIG |
| | | SGSGTDFTLTITSVQDEDLADYYCQQWYSYPWTFG |
| | | PGTKLEIK |
| SEQ ID NO: 203 | VL DNA | GACATCATGATGACCCAGTCTCCATCATCCCTGAG |
| | | TGTGTCAGCAGGAGAGAAAGCCACTATCACCTGCA |
| | | AGTCCAGTCAGAGTCTTTTCAACAGTAACACCAAC |
| | | AAGAACTACTTGAACTGGTACCTGCAGAAACCAGG |
| | | GCAGTCTCCTAAACTGCTGTTCTATTATGCATCCA |
| | | CTAGGCATACTGGGGTCCCTGATCGCTTCATAGGC |
| | | AGTGGATCTGGGACAGATTTCACTCTCACCATCAC |
| | | CAGTGTCCAGGATGAAGACCTGGCAGATTATTACT |
| | | GTCAGCAGTGGTATAGCTACCCGTGGACGTTCGGA |
| | | CCTGGCACCAAGCTGGAAATCAAA |
| SEQ ID NO: 340 | LC | DIMMTQSPSSLSVSAGEKATITCKSSQSLFNSNTN |
| | | KNYLNWYLQKPGQSPKLLFYYASTRHTGVPDRFIG |
| | | SGSGTDFTLTITSVQDEDLADYYCQQWYSYPWTFG |
| | | PGTKLE1KRTVAAPSVFIFPPSDEQLKSGTASVVC |
| | | LLNNFYPREAKVQWKVDNALQSGNSQESVTEQDSK |
| | | DSTYSLSSTLTLSKADYEKHKVYACEVTHQGLSSP |
| | | VTKSFNRGEC |
| SEQ ID NO: 341 | LC DNA | GACATCATGATGACCCAGTCTCCATCATCCCTGAG |
| | | TGTGTCAGCAGGAGAGAAAGCCACTATCACCTGCA |
| | | AGTCCAGTCAGAGTCTTTTCAACAGTAACACCAAC |
| | | AAGAACTACTTGAACTGGTACCTGCAGAAACCAGG |
| | | GCAGTCTCCTAAACTGCTGTTCTATTATGCATCCA |
| | | CTAGGCATACTGGGGTCCCTGATCGCTTCATAGGC |
| | | AGTGGATCTGGGACAGATTTCACTCTCACCATCAC |
| | | CAGTGTCCAGGATGAAGACCTGGCAGATTATTACT |
| | | GTCAGCAGTGGTATAGCTACCCGTGGACGTTCGGA |
| | | CCTGGCACCAAGCTGGAAATCAAAcgtacggtggc |
| | | cgctcccagcgtgttcatcttcccccccagcgacg |
| | | agcagctgaagagtggcaccgccagcgtggtgtgc |
| | | ctgctgaacaacttctacccccgggaggccaaggt |
| | | gcagtggaaggtggacaacgccctgcagagcggca |
| | | acagccaggagagcgtcaccgagcaggacagcaag |
| | | gactccacctacagcctgagcagcaccctgaccct |
| | | gagcaaggccgactacgagaagcataaggtgtacg |
| | | cctgcgaggtgacccaccagggcctgtccagcccc |
| | | gtgaccaagagcttcaacaggggcgagtgc |

[0793] In some embodiments, the anti-mouse ENTPD2 antibody or antibody fragment (e.g., an antigen binding fragment) comprises a VH domain having an amino acid sequence of any VH domain described in Table 23. Other suitable anti-mouse ENTPD2 antibodies or antibody fragments (e.g., antigen binding fragments) can include amino acids that have been mutated, yet have at least 80, 85, 90, 95, 96, 97, 98, or 99 percent identity in the VH domain with the VH regions depicted in the sequences described in Table 23. The present disclosure in certain embodiments also provides antibodies or antibody fragments (e.g., antigen binding fragments) that specifically bind to mouse ENTPD2, wherein the antibodies or antibody fragments (e.g., antigen binding fragments) comprise a VH CDR having an amino acid sequence of any one of the VH CDRs listed in Table 23. In particular embodiments, the invention provides antibodies or antibody fragments (e.g., antigen binding fragments) that specifically bind to mouse ENTPD2, comprising (or alternatively, consist of) one, two, three, four, five or more VH CDRs having an amino acid sequence of any one of the VH CDRs listed in Table 23.

[0794] In some embodiments, the anti-mouse ENTPD2 antibody or antibody fragment (e.g., antigen binding fragment) comprises a VL domain having an amino acid sequence of any VL domain described in Table 23. Other suitable anti-mouse ENTPD2 antibodies or antibody fragments (e.g., antigen binding fragments) can include amino acids that have been mutated, yet have at least 80, 85, 90, 95, 96, 97, 98, or 99 percent identity in the VL domain with the VL regions depicted in the sequences described in Table 23. The present disclosure also provides antibodies or antibody fragments (e.g., antigen binding fragments) that specifically bind to mouse ENTPD2, the antibodies or antibody fragments (e.g., antigen binding fragments) comprise a VL CDR having an amino acid sequence of any one of the VL CDRs listed in Table 23. In particular, the invention provides antibodies or antibody fragments (e.g., antigen binding fragments) that specifically bind to mouse ENTPD2, which comprise (or alternatively, consist of) one, two, three or more VL CDRs having an amino acid sequence of any one of the VL CDRs listed in Table 23.

[0795] Other anti-mouse ENTPD2 antibodies or antibody fragments (e.g., antigen binding fragment) disclosed herein include amino acids that have been mutated, yet have at least 80, 85, 90, 95, 96, 97, 98, or 99 percent identity in the CDR regions with the CDR regions depicted in the sequences described in Table 23. In some embodiments, it includes mutant amino acid sequences wherein no more than 1, 2, 3, 4 or 5 amino acids have been mutated in the CDR regions when compared with the CDR regions depicted in the sequence described in Table 23.

[0796] Also provided herein are nucleic acid sequences that encode VH, VL, full length heavy chain, and full length light chain of antibodies and antigen binding fragments thereof that specifically bind to mouse ENTPD2, e.g., the nucleic acid sequences in Table 23. Such nucleic acid sequences can be optimized for expression in mammalian cells.

[0797] Provided herein are also antibodies or antigen binding fragments thereof that specifically bind to an epitope in mouse ENTPD2, wherein the epitope comprises at least one (e.g., at least two, at least three, at least four, at least five, at least six, at least seven, at least eight, at least nine, at least ten, at least eleven, at least twelve, at least thirteen, at least fourteen, at least fifteen, at least twenty) of the following residues: Ser74, Cys75, Asp76, Tyr349, Tyr350, Asp353, Phe354, Thr357, Va1358, Gly360, Gln385, Ala386, Arg387, Val388, Pro389, Gly390, Gln391, Thr393, Arg394, or Tyr398.

[0798] Framework and Engineered or Modified Antibodies

[0799] An antibody of the invention further can be prepared using an antibody having one or more of the VH and/or VL sequences as starting material to engineer a modified antibody, which modified antibody may have altered properties from the starting antibody. An antibody can be engineered by modifying one or more residues within one or both variable regions (i.e., VH and/or VL), for example within one or more CDR regions and/or within one or more framework regions. Additionally or alternatively, an antibody can be engineered by modifying residues within the constant region(s), for example to alter the effector function(s) of the antibody.

[0800] One type of variable region engineering that can be performed is CDR grafting. Antibodies interact with target antigens predominantly through amino acid residues that are located in the six heavy and light chain complementarity determining regions (CDRs). For this reason, the amino acid sequences within CDRs are more diverse between individual antibodies than sequences outside of CDRs. Because CDR sequences are responsible for most antibody-antigen interactions, it is possible to express recombinant antibodies that mimic the properties of specific naturally occurring antibodies by constructing expression vectors that include CDR sequences from the specific naturally occurring antibody grafted onto framework sequences from a different antibody with different properties (see, e.g., Riechmann, L. et al., 1998 Nature 332:323-327; Jones, P. et al., 1986 Nature 321:522-525; Queen, C. et al., 1989 Proc. Natl. Acad., U.S.A. 86:10029-10033; U.S. Pat. No. 5,225,539 to Winter, and U.S. Pat. Nos. 5,530,101; 5,585,089; 5,693,762 and 6,180,370 to Queen et al.)

[0801] Such framework sequences can be obtained from public DNA databases or published references that include germline antibody gene sequences or rearranged antibody sequences. For example, germline DNA sequences for human heavy and light chain variable region genes can be found in the “VBase” human germline sequence database (available on the Internet at www.mrc-cpe.cam.ac.uk/vbase), as well as in Kabat, E. A., et al., 1991 Sequences of Proteins of Immunological Interest, Fifth Edition, U.S. Department of Health and Human Services, NIH Publication No. 91-3242; Tomlinson, I. M., et al., 1992 J. fol. Biol. 227:776-798; and Cox, J. P. L. et al., 1994 Eur. J Immunol. 24:827-836). For example, germline DNA sequences for human heavy and light chain variable region genes and rearranged antibody sequences can be found in “IMGT” database (available on the Internet at www.imgt.org; see Lefranc, M. P. et al., 1999 Nucleic Acids Res. 27:209-212).

[0802] An example of framework sequences for use in the antibodies and antigen binding fragments thereof of the invention are those that are structurally similar to the framework sequences used by selected antibodies and antigen binding fragments thereof of the invention, e.g., consensus sequences and/or framework sequences used by monoclonal antibodies of the invention. The VH CDR1, 2 and 3 sequences, and the VL CDR1, 2 and 3 sequences, can be grafted onto framework regions that have the identical sequence as that found in the germline immunoglobulin gene from which the framework sequence derive, or the CDR sequences can be grafted onto framework regions that contain one or more mutations as compared to the germline sequences. For example, it has been found that in certain instances it is beneficial to mutate residues within the framework regions to maintain or enhance the antigen binding ability of the antibody (see e.g., U.S. Pat. Nos. 5,530,101; 5,585,089; 5,693,762 and 6,180,370 to Queen et al).

[0803] Another type of variable region modification is to mutate amino acid residues within the VH and/or VL CDR1, CDR2 and/or CDR3 regions to thereby improve one or more binding properties (e.g., affinity) of the antibody of interest, known as “affinity maturation”. Site-directed mutagenesis or PCR-mediated mutagenesis can be performed to introduce the mutation(s) and the effect on antibody binding, or other functional property of interest, can be evaluated in in vitro or in vivo assays as described herein and provided in the Examples. Conservative modifications (as discussed above) can be introduced. The mutations may be amino acid substitutions, additions or deletions. Moreover, typically no more than one, two, three, four or five residues within a CDR region are altered.

[0804] A wide variety of antibody/immunoglobulin frameworks or scaffolds can be employed so long as the resulting polypeptide includes at least one binding region which specifically binds to the target e.g. ENTPD2 (e.g., human ENTPD2 protein). Such frameworks or scaffolds include the 5 main idiotypes of human immunoglobulins, antigen-binding fragments thereof, and include immunoglobulins of other animal species, preferably having humanized aspects. Single heavy-chain antibodies such as those identified in camelids are of particular interest in this regard. Novel frameworks, scaffolds and fragments continue to be discovered and developed by those skilled in the art.

[0805] In one aspect, disclosed herein is a method of generating non-immunoglobulin based antibodies using non-immunoglobulin scaffolds onto which CDRs of the invention can be grafted. Known or future non-immunoglobulin frameworks and scaffolds may be employed, as long as they comprise a binding region specific for the target e.g. ENTPD2 protein. Known non-immunoglobulin frameworks or scaffolds include, but are not limited to, fibronectin (Compound Therapeutics, Inc., Waltham, Mass.), ankyrin (Molecular Partners AG, Zurich, Switzerland), domain antibodies (Domantis, Ltd., Cambridge, Mass., and Ablynx nv, Zwijnaarde, Belgium), lipocalin (Pieris Proteolab AG, Freising, Germany), small modular immuno-pharmaceuticals (Trubion Pharmaceuticals Inc., Seattle, Wash.), maxybodies (Avidia, Inc., Mountain View, Calif.), Protein A (Affibody AG, Sweden), and affilin (gamma-crystallin or ubiquitin) (SciI Proteins GmbH, Halle, Germany).

[0806] The fibronectin scaffolds are based on fibronectin type III domain (e.g., the tenth module of the fibronectin type III (10 Fn3 domain)). The fibronectin type III domain has 7 or 8 beta strands which are distributed between two beta sheets, which themselves pack against each other to form the core of the protein, and further containing loops (analogous to CDRs) which connect the beta strands to each other and are solvent exposed. There are at least three such loops at each edge of the beta sheet sandwich, where the edge is the boundary of the protein perpendicular to the direction of the beta strands (see U.S. Pat. No. 6,818,418). These fibronectin-based scaffolds are not an immunoglobulin, although the overall fold is closely related to that of the smallest functional antibody fragment, the variable region of the heavy chain, which comprises the entire antigen recognition unit in camel and llama IgG. Because of this structure, the non-immunoglobulin antibody mimics antigen binding properties that are similar in nature and affinity for those of antibodies. These scaffolds can be used in a loop randomization and shuffling strategy in vitro that is similar to the process of affinity maturation of antibodies in vivo. These fibronectin-based molecules can be used as scaffolds where the loop regions of the molecule can be replaced with CDRs of the invention using standard cloning techniques.

[0807] The ankyrin technology is based on using proteins with ankyrin derived repeat modules as scaffolds for bearing variable regions which can be used for binding to different targets. The ankyrin repeat module is a 33 amino acid polypeptide consisting of two anti-parallel alpha-helices and a beta-turn. Binding of the variable regions is mostly optimized by using ribosome display.

[0808] Avimers are derived from natural A-domain containing protein such as LRP-1. These domains are used by nature for protein-protein interactions and in human over 250 proteins are structurally based on A-domains. Avimers consist of a number of different “A-domain” monomers (2-10) linked via amino acid linkers. Avimers can be created that can bind to the target antigen using the methodology described in, for example, U.S. Patent Application Publication Nos. 20040175756; 20050053973; 20050048512; and 20060008844.

[0809] Affibody affinity ligands are small, simple proteins composed of a three-helix bundle based on the scaffold of one of the IgG-binding domains of Protein A. Protein A is a surface protein from the bacterium Staphylococcus aureus. This scaffold domain consists of 58 amino acids, 13 of which are randomized to generate affibody libraries with a large number of ligand variants (See e.g., U.S. Pat. No. 5,831,012). Affibody molecules mimic antibodies, they have a molecular weight of 6 kDa, compared to the molecular weight of antibodies, which is 150 kDa. In spite of its small size, the binding site of affibody molecules is similar to that of an antibody.

[0810] Anticalins are products developed by the company Pieris ProteoLab AG. They are derived from lipocalins, a widespread group of small and robust proteins that are usually involved in the physiological transport or storage of chemically sensitive or insoluble compounds. Several natural lipocalins occur in human tissues or body liquids. The protein architecture is reminiscent of immunoglobulins, with hypervariable loops on top of a rigid framework. However, in contrast with antibodies or their recombinant fragments, lipocalins are composed of a single polypeptide chain with 160 to 180 amino acid residues, being just marginally bigger than a single immunoglobulin domain. The set of four loops, which makes up the binding pocket, shows pronounced structural plasticity and tolerates a variety of side chains. The binding site can thus be reshaped in a proprietary process in order to recognize prescribed target molecules of different shape with high affinity and specificity. One protein of lipocalin family, the bilin-binding protein (BBP) of Pieris Brassicae has been used to develop anticalins by mutagenizing the set of four loops. One example of a patent application describing anticalins is in PCT Publication No. WO 199916873.

[0811] Affilin molecules are small non-immunoglobulin proteins which are designed for specific affinities towards proteins and small molecules. New affilin molecules can be very quickly selected from two libraries, each of which is based on a different human derived scaffold protein. Affilin molecules do not show any structural homology to immunoglobulin proteins. Currently, two affilin scaffolds are employed, one of which is gamma crystalline, a human structural eye lens protein and the other is “ubiquitin” superfamily proteins. Both human scaffolds are very small, show high temperature stability and are almost resistant to pH changes and denaturing agents. This high stability is mainly due to the expanded beta sheet structure of the proteins. Examples of gamma crystalline derived proteins are described in WO200104144 and examples of “ubiquitin-like” proteins are described in WO2004106368.

[0812] Protein epitope mimetics (PEM) are medium-sized, cyclic, peptide-like molecules (MW 1-2 kDa) mimicking beta-hairpin secondary structures of proteins, the major secondary structure involved in protein-protein interactions.

[0813] Engineered antibodies and antigen-binding fragments thereof of the invention include those in which modifications have been made to framework residues within VH and/or VL, e.g. to improve the properties of the antibody. Typically such framework modifications are made to decrease the immunogenicity of the antibody. For example, one approach is to “backmutate” one or more framework residues to the corresponding germline sequence. More specifically, an antibody that has undergone somatic mutation may contain framework residues that differ from the germline sequence from which the antibody is derived. Such residues can be identified by comparing the antibody framework sequences to the germline sequences from which the antibody is derived. To return the framework region sequences to their germline configuration, the somatic mutations can be “backmutated” to the germline sequence by, for example, site-directed mutagenesis. Such “backmutated” antibodies are also intended to be encompassed by the invention.

[0814] Another type of framework modification involves mutating one or more residues within the framework region, or even within one or more CDR regions, to remove T cell-epitopes to thereby reduce the potential immunogenicity of the antibody. This approach is also referred to as “deimmunization” and is described in further detail in U.S. Patent Publication No. 20030153043 by Carr et al.

[0815] In addition or alternative to modifications made within the framework or CDR regions, antibodies of the invention may be engineered to include modifications within the Fc region, typically to alter one or more functional properties of the antibody, such as serum half-life, complement fixation, Fc receptor binding, and/or antigen-dependent cellular cytotoxicity. Furthermore, an antibody of the invention may be chemically modified (e.g., one or more chemical moieties can be attached to the antibody) or be modified to alter its glycosylation, again to alter one or more functional properties of the antibody. Each of these embodiments is described in further detail below. The numbering of residues in the Fc region is that of the EU index of Kabat.

[0816] In one embodiment, the hinge region of CH1 is modified such that the number of cysteine residues in the hinge region is altered, e.g., increased or decreased. This approach is described further in U.S. Pat. No. 5,677,425 by Bodmer et al. The number of cysteine residues in the hinge region of CH1 is altered to, for example, facilitate assembly of the light and heavy chains or to increase or decrease the stability of the antibody.

[0817] In another embodiment, the Fc hinge region of an antibody is mutated to decrease the biological half-life of the antibody. More specifically, one or more amino acid mutations are introduced into the CH2-CH3 domain interface region of the Fc-hinge fragment such that the antibody has impaired Staphylococcyl protein A (SpA) binding relative to native Fc-hinge domain SpA binding. This approach is described in further detail in U.S. Pat. No. 6,165,745 by Ward et al.

[0818] In another embodiment, the antibody is modified to increase its biological half-life. Various approaches are possible. For example, one or more of the following mutations can be introduced: T252L, T254S, T256F, as described in U.S. Pat. No. 6,277,375 to Ward. Alternatively, to increase the biological half life, the antibody can be altered within the CH1 or CL region to contain a salvage receptor binding epitope taken from two loops of a CH2 domain of an Fc region of an IgG, as described in U.S. Pat. Nos. 5,869,046 and 6,121,022 by Presta et al.

[0819] In one embodiment, the Fc region is altered by replacing at least one amino acid residue with a different amino acid residue to alter the effector functions of the antibody. For example, one or more amino acids can be replaced with a different amino acid residue such that the antibody has an altered affinity for an effector ligand but retains the antigen-binding ability of the parent antibody. The effector ligand to which affinity is altered can be, for example, an Fc receptor or the Cl component of complement. This approach is described in further detail in U.S. Pat. Nos. 5,624,821 and 5,648,260, both by Winter et al.

[0820] In another embodiment, one or more amino acids selected from amino acid residues can be replaced with a different amino acid residue such that the antibody has altered Clq binding and/or reduced or abolished complement dependent cytotoxicity (CDC). This approach is described in further detail in U.S. Pat. No. 6,194,551 by Idusogie et al.

[0821] In another embodiment, one or more amino acid residues are altered to thereby alter the ability of the antibody to fix complement. This approach is described further in PCT Publication WO 94/29351 by Bodmer et al.

[0822] In some embodiments, the ENTPD2-binding antibodies or antigen binding fragments thereof contain a human IgG1 constant region. In some embodiments, the human IgG1 constant region includes an Fc region.

[0823] In some embodiments, the Fc region of the ENTPD2-binding antibodies or antigen binding fragments thereof includes one or more mutations mediating reduced or no antibody-dependent cellular cytotoxicity (ADCC) or complement-dependent cytotoxicity (CDC). In some embodiments, amino acid residues L234 and L235 of the IgG1 constant region are substituted to A234 and A235. In some embodiments, amino acid residue N267 of the IgG1 constant region is substituted to A267. In some embodiments, amino acid residues D265 and P329 of the IgG1 constant region are substituted to A265 and A329. In certain embodiments, the Fc region optionally comprises a mutation or combination of mutations conferring reduced effector function selected from any one of D265A, P329A, P329G, N297A, D265A/P329A, D265A/N297A, L234/L235A, P329A/L234A/L235A, and P329G/L234A/L235A. In some embodiments, the Fc region comprises a mutation or combination of mutations conferring reduced effector function selected from any one of D265A, P329A, P329G, N297A, D265A/P329A, D265A/N297A, L234/L235A, P329A/L234A/L235A, and P329G/L234A/L235A (all positions by EU numbering).

[0824] In yet another embodiment, the Fc region is modified to increase the ability of the antibody to mediate antibody dependent cellular cytotoxicity (ADCC) and/or to increase the affinity of the antibody for an Fc-gamma receptor by modifying one or more amino acids. This approach is described further in PCT Publication WO 00/42072 by Presta. Moreover, the binding sites on human IgG1 for Fc-gamma RI, Fc-gamma RII, Fc-gamma RIII and FcRn have been mapped and variants with improved binding have been described (see Shields, R. L. et al., 2001 J. Biol. Chen. 276:6591-6604). For example, the Fc region can comprise a mutation or combination of mutations conferring increased effector function selected from any one of S239D, 1332E, A330L, S298A, E333A, E333S, K334A, K236A, K236W, F243L, P247I, D280H, K2905, R292P, S298D, S298V, Y300L, V3051, A339D, A339Q, A339T, P396L (all positions by EU numbering).

[0825] In still another embodiment, the glycosylation of an antibody is modified. For example, an aglycoslated antibody can be made (i.e., the antibody lacks glycosylation). Glycosylation can be altered to, for example, increase the affinity of the antibody for antigen. Such carbohydrate modifications can be accomplished by, for example, altering one or more sites of glycosylation within the antibody sequence. For example, one or more amino acid substitutions can be made that result in elimination of one or more variable region framework glycosylation sites to thereby eliminate glycosylation at that site. Such aglycosylation may increase the affinity of the antibody for antigen. Such an approach is described in further detail in U.S. Pat. Nos. 5,714,350 and 6,350,861 by Co et al.

[0826] Additionally or alternatively, an antibody can be made that has an altered type of glycosylation, such as a hypofucosylated antibody having reduced amounts of fucosyl residues or an antibody having increased bisecting GlcNac structures. Such altered glycosylation patterns have been demonstrated to increase the ADCC ability of antibodies. Such carbohydrate modifications can be accomplished by, for example, expressing the antibody in a host cell with altered glycosylation machinery. Cells with altered glycosylation machinery have been described in the art and can be used as host cells in which to express recombinant antibodies of the invention to thereby produce an antibody with altered glycosylation. For example, EP 1,176,195 by Hang et al. describes a cell line with a functionally disrupted FUT8 gene, which encodes a fucosyl transferase, such that antibodies expressed in such a cell line exhibit hypofucosylation. PCT Publication WO 03/035835 by Presta describes a variant CHO cell line, LecI3 cells, with reduced ability to attach fucose to Asn (297)-linked carbohydrates, also resulting in hypofucosylation of antibodies expressed in that host cell (see also Shields, R. L. et al., 2002 J. Biol. Chem. 277:26733-26740). PCT Publication WO 99/54342 by Umana et al. describes cell lines engineered to express glycoprotein-modifying glycosyl transferases (e.g., beta (1,4)—N acetylglucosaminyltransferase III (GnTIII)) such that antibodies expressed in the engineered cell lines exhibit increased bisecting GlcNac structures which results in increased ADCC activity of the antibodies (see also Umana et al., 1999 Nat. Biotech. 17:176-180).

[0827] In some embodiments, the ENTPD2 antibody has an IgG1 isotype with one or more mutations (e.g., relative to a wild-type Fc region of the same isotype). In some embodiments, the one or more mutations are selected from N297A, N297Q (BoltS et al. (1993) Eur J Immunol 23:403-411), D265A, L234A, L235A (McEarchern et al., (2007) Blood, 109:1185-1192), C226S, C229S (McEarchern et al., (2007) Blood, 109:1185-1192), P238S (Davis et al., (2007) J Rheumatol, 34:2204-2210), E233P, L234V (McEarchern et al., (2007) Blood, 109:1185-1192), P238A, A327Q, A327G, P329A (Shields R L. et al., (2001) J Bioi Chem. 276(9):6591-604), K322A, L234F, L235E (Hezareh, et al., (2001) J Viral 75, 12161-12168; Oganesyan et al., (2008). Acta Crystallographica 64, 700-704), P331S (Oganesyan et al., (2008) Acta Crystallographica 64, 700-704), T394D (Wilkinson et al. (2013) MAbs 5(3): 406-417), A330L, M252Y, S254T, and/or T256E, where the amino acid position is according to the EU or Kabat numbering convention. In certain embodiments, the Fc region further includes an amino acid deletion at a position corresponding to glycine 236 according to the EU or Kabat numbering convention.

[0828] In some embodiments, the antibody has an IgG1 isotype with a heavy chain constant region that contains a C220S mutation according to the EU or Kabat numbering convention.

[0829] In some embodiments, the Fc region contains one or more mutations selected from L234F, L235E, P331S, D265A, and/or N297Q, according to EU or Kabat numbering convention. In some embodiments, the Fc region contains one or more mutations selected from L234A, L235A, D265A, P329A, N297A, N297Q according to EU or Kabat numbering convention.

[0830] In certain embodiments, the antibody has an IgG2 isotype. In some embodiments, the antibody contains a human IgG2 constant region. In some embodiments, the human IgG2 constant region includes an Fc region. In some embodiments, the Fc region contains one or more modifications. For example, in some embodiments, the Fc region contains one or more mutations (e.g., relative to a wild-type Fc region of the same isotype). In some embodiments, the one or more mutations are selected from V234A, G237A, P238S, H268A, H268E, H268Q, V309L, N297A, N297Q, V309L, A330S, P331S, C232S, C233S, M252Y, S254T, and/or T256E, where the amino acid position is according to the EU or Kabat numbering convention.

[0831] In certain embodiments, the antibody has an IgG4 isotype. In some embodiments, the antibody contains a human IgG4 constant region. In some embodiments, the human IgG4 constant region includes an Fc region. In some embodiments, the Fc region contains one or more modifications. For example, in some embodiments, the Fc region contains one or more mutations (e.g., relative to a wild-type Fc region of the same isotype). In some embodiments, the one or more mutations are selected from E233P, F234V, L234A, L235A, G237A, E318A (Hutchins et al. (1995) Proc Natl A cad Sci USA, 92:11980-11984), S228P, L236E, S241P, L248E (Reddy et al., (2000) J Immunol, 164:1925-1933; Angal et al., (1993) Mol Immunol. 30(1):105-8; U.S. Pat. No. 8,614,299 B2), T394D, M252Y, S254T, T256E, N297A, and/or N297Q, where the amino acid position is according to the EU or Kabat numbering convention.

[0832] In some embodiments, the Fc region further contains one or more additional mutations selected from a M252Y, S254T, and/or T256E, where the amino acid position is according to the EU or Kabat numbering convention.

[0833] In some embodiments, one or more of the IgG1 variants described herein may be combined with an A330L mutation (Lazaret al., (2006) Proc Natl Acad Sci USA, 103:4005-4010), or one or more of L234F, L235E, and/or P331S mutations (Sazinsky et al., (2008) Proc Natl Acad Sci USA, 105:20167-20172), where the amino acid position is according to the EU or Kabat numbering convention, to eliminate complement activation. In some embodiments, the IgG variants described herein may be combined with one or more mutations to enhance the antibody half-life in human serum (e.g. M252Y, S254T,T256E mutations according to the EU or Kabat numbering convention) (Dall' Acqua et al., (2006) J Biol Chem, 281:23514-23524; and Strohl et al., (2009) Current Opinion in Biotechnology, 20:685-691).

[0834] In some embodiments, an IgG4 variant of the present disclosure may be combined with an S228P mutation according to the EU or Kabat numbering convention (Angal et al., (1993) Mol Immunol, 30:105-108) and/or with one or more mutations described in Peters et al., (2012) J Biol Chem. 13;287(29):24525-33) to enhance antibody stabilization.

[0835] In some embodiments, the antibody has an Fc region selected from an IgG2 Fc region, an IgG4 Fc region, or an IgG2/IgG4 hybrid Fc region.

[0836] Camelid Antibodies

[0837] Antibody proteins obtained from members of the camel and dromedary (Camelus bactrianus and Calelus dromaderius) family including new world members such as llama species (Lama paccos, Lama glama and Lama vicugna) have been characterized with respect to size, structural complexity and antigenicity for human subjects. Certain IgG antibodies from this family of mammals as found in nature lack light chains, and are thus structurally distinct from the typical four chain quaternary structure having two heavy and two light chains, for antibodies from other animals. See PCT/EP93/02214 (WO 94/04678 published 3 Mar. 1994).

[0838] A region of the camelid antibody which is the small single variable domain identified as VHH can be obtained by genetic engineering to yield a small protein having high affinity for a target, resulting in a low molecular weight antibody-derived protein known as a “camelid nanobody.” See U.S. Pat. No. 5,759,808 issued Jun. 2, 1998; see also Stijlemans, B. et al., 2004 J Biol Chem 279: 1256-1261; Dumoulin, M. et al., 2003 Nature 424: 783-788; Pleschberger, M. et al. 2003 Bioconjugate Chem 14: 440-448; Cortez-Retamozo, V. et al. 2002 Int J Cancer 89: 456-62; and Lauwereys, M. et al. 1998 EMBO J 17: 3512-3520. Engineered libraries of camelid antibodies and antibody fragments are commercially available, for example, from Ablynx, Ghent, Belgium. As with other antibodies and antigen-binding fragments thereof of non-human origin, an amino acid sequence of a camelid antibody can be altered recombinantly to obtain a sequence that more closely resembles a human sequence, i.e., the nanobody can be “humanized.” Thus the natural low antigenicity of camelid antibodies to humans can be further reduced.

[0839] The camelid nanobody has a molecular weight approximately one-tenth that of a human IgG molecule, and the protein has a physical diameter of only a few nanometers. One consequence of the small size is the ability of camelid nanobodies to bind to antigenic sites that are functionally invisible to larger antibody proteins, i.e., camelid nanobodies are useful as reagents detect antigens that are otherwise cryptic using classical immunological techniques, and as possible therapeutic agents. Thus yet another consequence of small size is that a camelid nanobody can inhibit as a result of binding to a specific site in a groove or narrow cleft of a target protein, and hence can serve in a capacity that more closely resembles the function of a classical low molecular weight drug than that of a classical antibody.

[0840] The low molecular weight and compact size further result in camelid nanobodies being extremely thermostable, stable to extreme pH and to proteolytic digestion, and poorly antigenic. Another consequence is that camelid nanobodies readily move from the circulatory system into tissues, and even cross the blood-brain barrier and can treat disorders that affect nervous tissue. Nanobodies can further facilitated drug transport across the blood brain barrier. See U.S. patent application 20040161738 published Aug. 19, 2004. These features combined with the low antigenicity to humans indicate great therapeutic potential. Further, these molecules can be fully expressed in prokaryotic cells such as E. coli and are expressed as fusion proteins with bacteriophage and are functional.

[0841] Accordingly, a feature of the present invention is a camelid antibody or nanobody having high affinity for ENTPD2. In one embodiment herein, the camelid antibody or nanobody is naturally produced in the camelid animal, i.e., is produced by the camelid following immunization with ENTPD2 or a peptide fragment thereof, using techniques described herein for other antibodies. Alternatively, the ENTPD2-binding camelid nanobody is engineered, i.e., produced by selection for example from a library of phage displaying appropriately mutagenized camelid nanobody proteins using panning procedures with ENTPD2 as a target as described in the examples herein. Engineered nanobodies can further be customized by genetic engineering to have a half life in a recipient subject of from 45 minutes to two weeks. In a specific embodiment, the camelid antibody or nanobody is obtained by grafting the CDRs sequences of the heavy or light chain of the human antibodies of the invention into nanobody or single domain antibody framework sequences, as described for example in PCT/EP93/02214.

[0842] Bispecific Molecules and Multivalent Antibodies

[0843] Dioslcosed herein are bispecific or multispecific molecules comprising a ENTPD2-binding antibody, or a fragment thereof, of the invention. An antibody of the invention, or antigen-binding regions thereof, can be derivatized or linked to another functional molecule, e.g., another peptide or protein (e.g., another antibody or ligand for a receptor) to generate a bispecific molecule that binds to at least two different binding sites or target molecules. The antibody of the invention may in fact be derivatized or linked to more than one other functional molecule to generate multi-specific molecules that bind to more than two different binding sites and/or target molecules; such multi-specific molecules are also intended to be encompassed by the term “bispecific molecule” as used herein. To create a bispecific molecule of the invention, an antibody of the invention can be functionally linked (e.g., by chemical coupling, genetic fusion, noncovalent association or otherwise) to one or more other binding molecules, such as another antibody, antibody fragment, peptide or binding mimetic, such that a bispecific molecule results.

[0844] Accordingly, disclosed herein are bispecific molecules comprising at least one first binding specificity for ENTPD2 and a second binding specificity for a second target epitope. For example, the second target epitope is another epitope of ENTPD2 different from the first target epitope.

[0845] Additionally, for the case that the bispecific molecule is multi-specific, the molecule can further include a third binding specificity, in addition to the first and second target epitope.

[0846] The bispecific molecules disclosed herein comprise as a binding specificity at least one antibody, or an antibody fragment thereof, including, e.g., a Fab, Fab′, F (ab′)2, Fv, or a single chain Fv. The antibody may also be a light chain or heavy chain dimer, or any minimal fragment thereof such as a Fv or a single chain construct as described in Ladner et al. U.S. Pat. No. 4,946,778.

[0847] Diabodies are bivalent, bispecific molecules in which VH and VL domains are expressed on a single polypeptide chain, connected by a linker that is too short to allow for pairing between the two domains on the same chain. The VH and VL domains pair with complementary domains of another chain, thereby creating two antigen binding sites (see e.g., Holliger et al., 1993 Proc. Natl. Acad. Sci. USA 90:6444-6448; Poijak et al., 1994 Structure 2:1121-1123). Diabodies can be produced by expressing two polypeptide chains with either the structure VHA-VLB and VHB-VLA (VH-VL configuration), or VLA-VHB and VLB-VHA (VL-VH configuration) within the same cell. Most of them can be expressed in soluble form in bacteria. Single chain diabodies (scDb) are produced by connecting the two diabody-forming polypeptide chains with linker of approximately 15 amino acid residues (see Holliger and Winter, 1997 Cancer Immunol. Immunother., 45 (3-4):128-30; Wu et al., 1996 Immunotechnology, 2 (1):21-36). scDb can be expressed in bacteria in soluble, active monomeric form (see Holliger and Winter, 1997 Cancer Immunol. Immunother., 45 (34): 128-30; Wu et al., 1996 Immunotechnology, 2 (1):21-36; Pluckthun and Pack, 1997 Immunotechnology, 3 (2): 83-105; Ridgway et al., 1996 Protein Eng., 9 (7):617-21). A diabody can be fused to Fc to generate a “di-diabody” (see Lu et al., 2004 J. Biol. Chem., 279 (4):2856-65).

[0848] Other antibodies which can be employed in the bispecific molecules of the invention are murine, chimeric and humanized monoclonal antibodies.

[0849] The bispecific molecules of the present invention can be prepared by conjugating the constituent binding specificities, using methods known in the art. For example, each binding specificity of the bispecific molecule can be generated separately and then conjugated to one another. When the binding specificities are proteins or peptides, a variety of coupling or cross-linking agents can be used for covalent conjugation. Examples of cross-linking agents include protein A, carbodiimide, N-succinimidyl-5-acetyl-thioacetate (SATA), 5,5′-dithiobis (2-nitrobenzoic acid) (DTNB), o-phenylenedimaleimide (oPDM), N-succinimidyl-3-(2-pyridyldithio)propionate (SPDP), and sulfosuccinimidyl 4-(N-maleimidomethyl)cyclohaxane-1-carboxylate (sulfo-SMCC) (see e.g., Karpovsky et al., 1984 J. Exp. Med. 160:1686; Liu, M A et al., 1985 Proc. Natl. Acad. Sci. USA 82:8648). Other methods include those described in Paulus, 1985 Behring Ins. Mitt. No. 78, 118-132; Brennan et al., 1985 Science 229:81-83), and Glennie et al., 1987 J. Immunol. 139: 2367-2375). Conjugating agents are SATA and sulfo-SMCC, both available from Pierce Chemical Co. (Rockford, Ill.).

[0850] When the binding specificities are antibodies, they can be conjugated by sulfhydryl bonding of the C-terminus hinge regions of the two heavy chains. In a particularly embodiment, the hinge region is modified to contain an odd number of sulfhydryl residues, for example one, prior to conjugation.

[0851] Alternatively, both binding specificities can be encoded in the same vector and expressed and assembled in the same host cell. This method is particularly useful where the bispecific molecule is a mAb X mAb, mAb X Fab, Fab X F (ab′)2 or ligand X Fab fusion protein. A bispecific molecule of the invention can be a single chain molecule comprising one single chain antibody and a binding determinant, or a single chain bispecific molecule comprising two binding determinants. Bispecific molecules may comprise at least two single chain molecules. Methods for preparing bispecific molecules are described for example in U.S. Pat. Nos. 5,260,203; 5,455,030; 4,881,175; 5,132,405; 5,091,513; 5,476,786; 5,013,653; 5,258,498; and 5,482,858.

[0852] Binding of the bispecific molecules to their specific targets can be confirmed by, for example, enzyme-linked immunosorbent assay (ELISA), radioimmunoassay (REA), FACS analysis, bioassay (e.g., growth inhibition), or Western Blot assay. Each of these assays generally detects the presence of protein-antibody complexes of particular interest by employing a labeled reagent (e.g., an antibody) specific for the complex of interest.

[0853] In another aspect, the present invention provides multivalent compounds comprising at least two identical or different antigen-binding portions of the antibodies and antigen-binding fragments thereof of the invention binding to ENTPD2. The antigen-binding portions can be linked together via protein fusion or covalent or noncovalent linkage. Alternatively, methods of linkage has been described for the bispecific molecules. Tetravalent compounds can be obtained for example by cross-linking antibodies and antigen-binding fragments thereof of the invention with an antibody or antigen-binding fragment that binds to the constant regions of the antibodies and antigen-binding fragments thereof of the invention, for example the Fc or hinge region.

[0854] Trimerizing domain are described for example in European patent EP 1 012 280B1. Pentamerizing modules are described for example in PCT/EP97/05897.

[0855] In some embodiments, the ENTPD2-binding antibodies or antigen binding fragments thereof are bispecific antibodies that recognize a first antigen and a second antigen. In some embodiments, the first antigen is human ENTPD2 or a naturally occurring variant thereof. In some embodiments, the second antigen may be a protein, lipid, polysaccharide, or glycolipid expressed on one or more tumor cells.

[0856] Antibodies with Extended Half Life

[0857] The combination of the present invention relates in some embodiments to antibodies that specifically bind to ENTPD2 (e.g., human ENTPD2 protein) and have an extended half-life in vivo.

[0858] Many factors may affect a protein's half life in vivo. For examples, kidney filtration, metabolism in the liver, degradation by proteolytic enzymes (proteases), and immunogenic responses (e.g., protein neutralization by antibodies and uptake by macrophages and dendritic cells). A variety of strategies can be used to extend the half life of the antibodies and antigen-binding fragments thereof of the present invention. For example, by chemical linkage to polyethylene glycol (PEG), reCODE PEG, antibody scaffold, polysialic acid (PSA), hydroxyethyl starch (HES), albumin-binding ligands, and carbohydrate shields; by genetic fusion to proteins binding to serum proteins, such as albumin, IgG, FcRn, and transferring; by coupling (genetically or chemically) to other binding moieties that bind to serum proteins, such as nobodies, Fabs, DARPins, avimers, affibodies, and anticalins; by genetic fusion to rPEG, albumin, domain of albumin, albumin-binding proteins, and Fc; or by incorporation into nancarriers, slow release formulations, or medical devices.

[0859] To prolong the serum circulation of antibodies in vivo, inert polymer molecules such as high molecular weight PEG can be attached to the antibodies or a fragment thereof with or without a multifunctional linker either through site-specific conjugation of the PEG to the N- or C-terminus of the antibodies or via epsilon-amino groups present on lysine residues. To pegylate an antibody, the antibody, antigen-binding fragment thereof, typically is reacted with polyethylene glycol (PEG), such as a reactive ester or aldehyde derivative of PEG, under conditions in which one or more PEG groups become attached to the antibody or antibody fragment. The pegylation can be carried out by an acylation reaction or an alkylation reaction with a reactive PEG molecule (or an analogous reactive water-soluble polymer). As used herein, the term “polyethylene glycol” is intended to encompass any one of the forms of PEG that have been used to derivatize other proteins, such as mono (C1-C 10)alkoxy- or aryloxy-polyethylene glycol or polyethylene glycol-maleimide. In one embodiment, the antibody to be pegylated is an aglycosylated antibody. Linear or branched polymer derivatization that results in minimal loss of biological activity will be used. The degree of conjugation can be closely monitored by SDS-PAGE and mass spectrometry to ensure proper conjugation of PEG molecules to the antibodies. Unreacted PEG can be separated from antibody-PEG conjugates by size-exclusion or by ion-exchange chromatography. PEG-derivatized antibodies can be tested for binding activity as well as for in vivo efficacy using methods well-known to those of skill in the art, for example, by immunoassays described herein. Methods for pegylating proteins are known in the art and can be applied to the antibodies and antigen-binding fragments thereof of the invention. See for example, EP 0154316 by Nishimura et al. and EP 0401384 by Ishikawa et al.

[0860] Other modified pegylation technologies include reconstituting chemically orthogonal directed engineering technology (ReCODE PEG), which incorporates chemically specified side chains into biosynthetic proteins via a reconstituted system that includes tRNA synthetase and tRNA. This technology enables incorporation of more than 30 new amino acids into biosynthetic proteins in E. coli, yeast, and mammalian cells. The tRNA incorporates a normative amino acid any place an amber codon is positioned, converting the amber from a stop codon to one that signals incorporation of the chemically specified amino acid.

[0861] Recombinant pegylation technology (rPEG) can also be used for serum halflife extension. This technology involves genetically fusing a 300-600 amino acid unstructured protein tail to an existing pharmaceutical protein. Because the apparent molecular weight of such an unstructured protein chain is about 15-fold larger than its actual molecular weight, the serum halflife of the protein is greatly increased. In contrast to traditional PEGylation, which requires chemical conjugation and repurification, the manufacturing process is greatly simplified and the product is homogeneous.

[0862] Polysialytion is another technology, which uses the natural polymer polysialic acid (PSA) to prolong the active life and improve the stability of therapeutic peptides and proteins. PSA is a polymer of sialic acid (a sugar). When used for protein and therapeutic peptide drug delivery, polysialic acid provides a protective microenvironment on conjugation. This increases the active life of the therapeutic protein in the circulation and prevents it from being recognized by the immune system. The PSA polymer is naturally found in the human body. It was adopted by certain bacteria which evolved over millions of years to coat their walls with it. These naturally polysialylated bacteria were then able, by virtue of molecular mimicry, to foil the body's defense system. PSA can be easily produced from such bacteria in large quantities and with predetermined physical characteristics. Bacterial PSA is completely non-immunogenic, even when coupled to proteins, as it is chemically identical to PSA in the human body.

[0863] Another technology include the use of hydroxyethyl starch (“HES”) derivatives linked to antibodies. HES is a modified natural polymer derived from waxy maize starch and can be metabolized by the body's enzymes. HES solutions are usually administered to substitute deficient blood volume and to improve the rheological properties of the blood. Hesylation of an antibody enables the prolongation of the circulation half-life by increasing the stability of the molecule, as well as by reducing renal clearance, resulting in an increased biological activity. By varying different parameters, such as the molecular weight of HES, a wide range of HES antibody conjugates can be customized.

[0864] Antibodies having an increased half-life in vivo can also be generated introducing one or more amino acid modifications (i.e., substitutions, insertions or deletions) into an IgG constant domain, or FcRn binding fragment thereof (preferably a Fc or hinge Fc domain fragment). See, e.g., International Publication No. WO 98/23289; International Publication No. WO 97/34631; and U.S. Pat. No. 6,277,375.

[0865] Further, antibodies can be conjugated to albumin in order to make the antibody or antibody fragment more stable in vivo or have a longer half life in vivo. The techniques are well-known in the art, see, e.g., International Publication Nos. WO 93/15199, WO 93/15200, and WO 01/77137; and European Patent No. EP 413,622.

[0866] The strategies for increasing half life is especially useful in nanobodies, fibronectin-based binders, and other antibodies or proteins for which increased in vivo half life is desired.

[0867] Antibody Conjugates

[0868] Dislosed herein are antibodies or antigen-binding fragments thereof that specifically bind to the extracellular domain of ENTPD2 (e.g., human ENTPD2 protein) recombinantly fused or chemically conjugated (including both covalent and non-covalent conjugations) to a heterologous protein or polypeptide (or antigen-binding fragment thereof, preferably to a polypeptide of at least 10, at least 20, at least 30, at least 40, at least 50, at least 60, at least 70, at least 80, at least 90 or at least 100 amino acids) to generate fusion proteins. In particular, the invention provides fusion proteins comprising an antigen-binding fragment of an antibody described herein (e.g., a Fab fragment, Fd fragment, Fv fragment, F (ab)2 fragment, a VH domain, a VH CDR, a VL domain or a VL CDR) and a heterologous protein, polypeptide, or peptide. Methods for fusing or conjugating proteins, polypeptides, or peptides to an antibody or an antibody fragment are known in the art. See, e.g., U.S. Pat. Nos. 5,336,603, 5,622,929, 5,359,046, 5,349,053, 5,447,851, and 5,112,946; European Patent Nos. EP 307,434 and EP 367,166; International Publication Nos. WO 96/04388 and WO 91/06570; Ashkenazi et al., 1991, Proc. Natl. Acad. Sci. USA 88: 10535-10539; Zheng et al., 1995, J. Immunol. 154:5590-5600; and Vil et al., 1992, Proc. Natl. Acad. Sci. USA 89:11337-11341.

[0869] Additional fusion proteins may be generated through the techniques of gene-shuffling, motif-shuffling, exon-shuffling, and/or codon-shuffling (collectively referred to as “DNA shuffling”). DNA shuffling may be employed to alter the activities of antibodies and antigen-binding fragments thereof of the invention (e.g., antibodies and antigen-binding fragments thereof with higher affinities and lower dissociation rates). See, generally, U.S. Pat. Nos. 5,605,793, 5,811,238, 5,830,721, 5,834,252, and 5,837,458; Patten et al., 1997, Curr. Opinion Biotechnol. 8:724-33; Harayama, 1998, Trends Biotechnol. 16 (2):76-82; Hansson, et al., 1999, J. Mol. Biol. 287:265-76; and Lorenzo and Blasco, 1998, Biotechniques 24 (2):308-313). Antibodies and antigen-binding fragments thereof, or the encoded antibodies and antigen-binding fragments thereof, may be altered by being subjected to random mutagenesis by error-prone PCR, random nucleotide insertion or other methods prior to recombination. A polynucleotide encoding an antibody antigen-binding fragment thereof that specifically binds to ENTPD2 (e.g., human ENTPD2 protein) may be recombined with one or more components, motifs, sections, parts, domains, fragments, etc. of one or more heterologous molecules.

[0870] Moreover, the antibodies and antigen-binding fragments thereof can be fused to marker sequences, such as a peptide to facilitate purification. In one embodiment, the marker amino acid sequence is a hexa-histidine peptide (SEQ ID NO: 639), such as the tag provided in a pQE vector (QIAGEN, Inc., 9259 Eton Avenue, Chatsworth, Calif., 91311), among others, many one of which are commercially available. As described in Gentz et al., 1989, Proc. Natl. Acad. Sci. USA 86:821-824, for instance, hexa-histidine (SEQ ID NO: 639) provides for convenient purification of the fusion protein. Other peptide tags useful for purification include, but are not limited to, the hemagglutinin (“HA”) tag, which corresponds to an epitope derived from the influenza hemagglutinin protein (Wilson et al., 1984, Cell 37:767), and the “FLAG” tag.

[0871] In one embodiment, antibodies and antigen-binding fragments thereof of the present invention antigen-binding fragments thereof conjugated to a diagnostic or detectable agent. Such antibodies can be useful for monitoring or prognosing the onset, development, progression and/or severity of a disease or disorder as part of a clinical testing procedure, such as determining the efficacy of a particular therapy. Such diagnosis and detection can accomplished by coupling the antibody to detectable substances including, but not limited to, various enzymes, such as, but not limited to, horseradish peroxidase, alkaline phosphatase, beta-galactosidase, or acetylcholinesterase; prosthetic groups, such as, but not limited to, streptavidin/biotin and avidin/biotin; fluorescent materials, such as, but not limited to, umbelliferone, fluorescein, fluorescein isothiocynate, rhodamine, dichlorotriazinylamine fluorescein, dansyl chloride or phycoerythrin; luminescent materials, such as, but not limited to, luminol; bioluminescent materials, such as but not limited to, luciferase, luciferin, and aequorin; radioactive materials, such as, but not limited to, iodine (131I, 125I, 123I, and 121I), carbon (14C), sulfur (35S), tritium (3H), indium (115In, 113In, 112In, and 111In), technetium (99Tc), thallium (201Ti), gallium (68Ga, 67Ga), palladium (103Pd), molybdenum (99Mo), xenon (133Xe), fluorine (18F), 153Sm, 177Lu, 159Gd, 149 Pm, 140La, 175Yb, 166Ho, 90Y, 47Sc, 186Re, 188Re, 142Pr, 105Rh, 97Ru, 68Ge, 57Co, 65Zn, 85Sr, 32P, 153Gd, 169Yb, 51Cr, 54Mn, 75Se, 113Sn, and 117Tin; and positron emitting metals using various positron emission tomographies, and nonradioactive paramagnetic metal ions.

[0872] Further, an antibody antigen-binding fragment thereof may be conjugated to a therapeutic moiety or drug moiety. Therapeutic moieties or drug moieties are not to be construed as limited to classical chemical therapeutic agents. For example, the drug moiety may be a protein, peptide, or polypeptide possessing a desired biological activity. Such proteins may include, for example, a toxin such as abrin, ricin A, pseudomonas exotoxin, cholera toxin, or diphtheria toxin; a protein such as tumor necrosis factor, alpha-interferon, beta-interferon, nerve growth factor, platelet derived growth factor, tissue plasminogen activator, an apoptotic agent, an anti-angiogenic agent; or, a biological response modifier such as, for example, a lymphokine.

[0873] Moreover, an antibody can be conjugated to therapeutic moieties such as a radioactive metal ion, such as alpha-emitters such as 213Bi or macrocyclic chelators useful for conjugating radiometal ions, including but not limited to, 131In, 131LU, 131Y, 131Ho, 131Sm, to polypeptides. In one embodiment, the macrocyclic chelator is 1,4,7,10-tetraazacyclododecane-N,N′,N″,N′″-tetraacetic acid (DOTA) which can be attached to the antibody via a linker molecule. Such linker molecules are commonly known in the art and described in Denardo et al., 1998, Clin Cancer Res. 4 (10):2483-90; Peterson et al., 1999, Bioconjug. Chem. 10 (4):553-7; and Zimmerman et al., 1999, Nucl. Med. Biol. 26 (8):943-50, each incorporated by reference in their entireties.

[0874] Techniques for conjugating therapeutic moieties to antibodies are well known, see, e.g., Amon et al., “Monoclonal Antibodies For Immunotargeting Of Drugs In Cancer Therapy,” in Monoclonal Antibodies And Cancer Therapy, Reisfeld et al. (eds.), pp. 243-56 (Alan R. Liss, Inc. 1985); Hellstrom et al., “Antibodies For Drug Delivery”, in Controlled Drug Delivery (2nd Ed.), Robinson et al. (eds.), pp. 623-53 (Marcel Dekker, Inc. 1987); Thorpe, “Antibody Carriers Of Cytotoxic Agents In Cancer Therapy: A Review”, in Monoclonal Antibodies 84: Biological And Clinical Applications, Pinchera et al. (eds.), pp. 475-506 (1985); “Analysis, Results, And Future Prospective Of The Therapeutic Use Of Radiolabeled Antibody In Cancer Therapy”, in Monoclonal Antibodies For Cancer Detection And Therapy, Baldwin et al. (eds.), pp. 303-16 (Academic Press 1985), and Thorpe et al., 1982, Immunol. Rev. 62:119-58.

[0875] Antibodies may also be attached to solid supports, which are particularly useful for immunoassays or purification of the target antigen. Such solid supports include, but are not limited to, glass, cellulose, polyacrylamide, nylon, polystyrene, polyvinyl chloride or polypropylene.

### Nucleic Acids Encoding the Antibodies, Vectors and Host Cells

[0876] Also provided herein are nucleic acids encoding an antibody or antigen binding fragment thereof described herein. Such nucleic acids can encode polypeptides comprising segments or domains of the ENTPD2 antibodies or antigen-binding fragments thereof described above. Such nucleic acids or polynucleotides can encode at least one CDR region and usually all three CDR regions from the heavy or light chain of the ENTPD2 antibodies described herein. Such nucleic acids or polynucleotides can also encode all or substantially all of the variable region sequence of the heavy chain and/or the light chain of the ENTPD2 antibodies described herein. Such nucleic acids or polynucleotides can also encode both a variable region and a constant region of the antibody. Because of the degeneracy of the code, a variety of nucleic acid sequences will encode each of the immunoglobulin amino acid sequences. For example, the invention features a first and second nucleic acid encoding heavy and light chain variable regions, respectively, of an anti-human ENTPD2 antibody molecule chosen from one or more of the antibody molecules disclosed herein. The nucleic acid can comprise a nucleotide sequence as set forth in Table 1, or a sequence substantially identical thereto (e.g., a sequence having at least about 85%, 90%, 95%, or 99% sequence identity thereto, or which differs by no more than 3, 6, 15, 30, or 45 nucleotides from the sequences shown in Table 1).

[0877] In certain embodiments, the nucleic acid can comprise a nucleotide sequence encoding at least one, two, or three CDRs or hypervariable loops from a heavy chain variable region having an amino acid sequence as set forth in Table 1, or a sequence substantially homologous thereto (e.g., a sequence having at least about 85%, 90%, 95%, or 99% sequence identity thereto, and/or having one or more substitutions, e.g., conserved substitutions). In other embodiments, the nucleic acid can comprise a nucleotide sequence encoding at least one, two, or three CDRs or hypervariable loops from a light chain variable region having an amino acid sequence as set forth in Table 1, or a sequence substantially homologous thereto (e.g., a sequence having at least about 85%, 90%, 95%, or 99% sequence identity thereto, and/or having one or more substitutions, e.g., conserved substitutions). In yet another embodiment, the nucleic acid can comprise a nucleotide sequence encoding at least one, two, three, four, five, or six CDRs or hypervariable loops from heavy and light chain variable regions having an amino acid sequence as set forth in Table 1, or a sequence substantially homologous thereto (e.g., a sequence having at least about 85%, 90%, 95%, or 99% sequence identity thereto, and/or having one or more substitutions, e.g., conserved substitutions).

[0878] In certain embodiments, the nucleic acid can comprise a nucleotide sequence encoding at least one, two, or three CDRs or hypervariable loops from a heavy chain variable region having the nucleotide sequence as set forth in Table 1, a sequence substantially homologous thereto (e.g., a sequence having at least about 85%, 90%, 95%, or 99% sequence identity thereto). In another embodiment, the nucleic acid can comprise a nucleotide sequence encoding at least one, two, or three CDRs or hypervariable loops from a light chain variable region having the nucleotide sequence as set forth in Table 1, or a sequence substantially homologous thereto (e.g., a sequence having at least about 85%, 90%, 95%, or 99% sequence identity thereto) In yet another embodiment, the nucleic acid can comprise a nucleotide sequence encoding at least one, two, three, four, five, or six CDRs or hypervariable loops from heavy and light chain variable regions having the nucleotide sequence as set forth in Table 1, or a sequence substantially homologous thereto (e.g., a sequence having at least about 85%, 90%, 95%, or 99% sequence identity thereto).

[0879] The polynucleotide sequences can be produced by de novo solid-phase DNA synthesis or by PCR mutagenesis of an existing sequence encoding an ENTPD2-binding antibody or its binding fragment. Direct chemical synthesis of nucleic acids can be accomplished by methods known in the art, such as the phosphotriester method of Narang et al., 1979, Meth. Enzymol. 68:90; the phosphodiester method of Brown et al., Meth. Enzymol. 68:109, 1979; the diethylphosphoramidite method of Beaucage et al., Tetra. Lett., 22:1859, 1981; and the solid support method of U.S. Pat. No. 4,458,066. Introducing mutations to a polynucleotide sequence by PCR can be performed as described in, e.g., PCR Technology: Principles and Applications for DNA Amplification, H. A. Erlich (Ed.), Freeman Press, NY, N.Y., 1992; PCR Protocols: A Guide to Methods and Applications, Innis et al. (Ed.), Academic Press, San Diego, Calif., 1990; Mattila et al., Nucleic Acids Res. 19:967, 1991; and Eckert et al., PCR Methods and Applications 1:17, 1991.

[0880] Also provided herein are vectors (e.g., expression vectors) comprising a nucleic acid encoding a polypeptide comprising a segment or domain of the ENTPD2 antibodies or antigen-binding fragments thereof described herein. Such vectors can be employed to express and/or produce the ENTPD2-binding antibodies or antigen-binding fragments thereof. The term “expression vector” refers to a carrier nucleic acid molecule into which a desired coding sequence can be inserted for introduction into a cell where it can be expressed. The vector can be a DNA vector, a RNA vector, a plasmid, a cosmid, or a viral vector, or artificial chromosomes (see, e.g., Harrington et al., Nat Genet 15:345, 1997). For example, nonviral vectors useful for expression of the ENTPD2-binding antibodies or antigen-binding fragments thereof in mammalian (e.g., human) cells include pThioHis A, B & C, pcDNA3.1/His, pEBVHis A, B & C, (Invitrogen, San Diego, Calif.), MPSV vectors, and numerous other vectors known in the art for expressing proteins. For example, one class of vectors utilizes DNA elements which are derived from animal viruses such as, for example, bovine papilloma virus, polyoma virus, adenovirus, vaccinia virus, baculovirus, retroviruses (Rous Sarcoma Virus, MMTV or MOMLV) or SV40 virus. Another class of vectors utilizes RNA elements derived from RNA viruses such as Semliki Forest virus, Eastern Equine Encephalitis virus and Flaviviruses.

[0881] Useful viral vectors include vectors based on any one of the following viruses: retroviruses, lentiviruses, adenoviruses, adeno-associated viruses, herpes viruses (e.g., Herpes Simplex Virus (HSV)), vectors based on SV40, papilloma virus, HBP Epstein Barr virus, vaccinia virus, Sinbis virus, influenza virus, reovirus, Newcastle disease virus (NDV), measles virus, vesicular stomatitis virus (VSV), parvovirus, poliovirus, poxvirus, Seneca Valley virus, coxsackievirus, enterovirus, myxoma virus, maraba virus, or Semliki Forest virus (SFV). See, Brent et al., supra; Smith, Annu. Rev. Microbiol. 49:807, 1995; and Rosenfeld et al., Cell 68:143, 1992.

[0882] In some embodiments, the vector is a lentiviral vector. Vectors derived from retroviruses such as the lentivirus are suitable tools to achieve long-term gene transfer since they allow long-term, stable integration of a transgene and its propagation in daughter cells. Lentiviral vectors have the added advantage over vectors derived from onco-retroviruses such as murine leukemia viruses in that they can transduce non-proliferating cells, such as hepatocytes. They also have the added advantage of low immunogenicity. A retroviral vector may also be, e.g., a gammaretroviral vector. A gammaretroviral vector may include, e.g., a promoter, a packaging signal (w), a primer binding site (PBS), one or more (e.g., two) long terminal repeats (LTR), and a transgene of interest, e.g., a gene encoding a CAR. A gammaretroviral vector may lack viral structural gens such as gag, pol, and env. Exemplary gammaretroviral vectors include Murine Leukemia Virus (MLV), Spleen-Focus Forming Virus (SFFV), and Myeloproliferative Sarcoma Virus (MPSV), and vectors derived therefrom. Other gammaretroviral vectors are described, e.g., in Tobias Maetzig et al., “Gammaretroviral Vectors: Biology, Technology and Application” Viruses. 2011 Jun; 3(6): 677-713.

[0883] In some embodiments, the vector is an adeno-associated virus (AAV) vector, e.g., a recombinant AAV (rAAV) vector. “AAV” is an abbreviation for adeno-associated virus, and may be used to refer to the virus itself or derivatives thereof. The term covers all subtypes and both naturally occurring and recombinant forms, except where required otherwise. The abbreviation “rAAV” refers to recombinant adeno-associated virus, also referred to as a recombinant AAV vector (or “rAAV vector”). The term “AAV” includes, for example, AAV type 1 (AAV1), AAV type 2 (AAV2), AAV type 3 (AAV3), AAV type 4 (AAV4), AAV type 5 (AAV5), AAV type 6 (AAV6), AAV type 7 (AAV7), AAV type 8 (AAV8), AAV type 9 (AAV9), AAV type 10 (AAV10, including AAVrh10), AAV type 12 (AAV12), avian AAV, bovine AAV, canine AAV, equine AAV, primate AAV, non-primate AAV, and ovine AAV. “Primate AAV” refers to AAV that infect primates, “non-primate AAV” refers to AAV that infect non-primate mammals, “bovine AAV” refers to AAV that infect bovine mammals, and so on.

[0884] The genomic sequences of various serotypes of AAV, as well as the sequences of the native inverted terminal repeats (ITRs), Rep proteins, and capsid subunits are known in the art. Such sequences may be found in the literature or in public databases such as GenBank. See, e.g., GenBank Accession NOs. NC-002077 (AAV1), AF063497 (AAV1), NC-001401 (AAV2), AF043303 (AAV2), NC-001729 (AAV3), NC-001829 (AAV4), U89790 (AAV4), NC-006152 (AAV5), AF513851 (AAV7), AF513852 (AAV8), and NC-006261 (AAV8); or in publications such as WO2005033321 (AAV1-9), the disclosures of which are incorporated by reference herein. See also, e.g., Srivistava et al. (1983) J. Virology 45:555; Chiorini et al. (1998) J. Virology 71:6823; Chiorini et al. (1999) J. Virology 73: 1309; Bantel-Schaal et al. (1999) J. Virology 73:939; Xiao et al. (1999) J. Virology 73:3994; Muramatsu et al. (1996) Virology 221:208; Shade et al.,(1986) J. Virol. 58:921; Gao et al. (2002) Proc. Nat. Acad. Sci. USA 99: 11854; Moris et al. (2004) Virology 33:375-383; international patent publications WO 00/28061, WO 99/61601, WO 98/11244; and U. S. Pat. No. 6,156,303.

[0885] An “rAAV vector” as used herein refers to an AAV vector comprising a polynucleotide sequence not of AAV origin (i.e., a polynucleotide heterologous to AAV), typically a sequence of interest for the genetic transformation of a cell. In some embodiments, the heterologous polynucleotide may be flanked by at least one, and sometimesby two, AAV inverted terminal repeat (ITR) sequences. The term rAAV vector encompasses both rAAV vector particles and rAAV vector plasmids. An rAAV vector may either be single-stranded (ssAAV) or self-complementary (scAAV). An “AAV virus” or “AAV viral particle” or “rAAV vector particle” refers to a viral particle composed of at least one AAV capsid protein (typically by all of the capsid proteins of a wild-type AAV) and an encapsidated polynucleotide rAAV vector. If the particle comprises a heterologous polynucleotide (i.e., a polynucleotide other than a wild-type AAV genome such as a transgene to be delivered to a mammalian cell), it is typically referred to as an “rAAV vector particle” or simply an “rAAV vector.” Thus, production of rAAV particle necessarily includes production of rAAV vector, as such a vector is contained within an rAAV particle.

[0886] In some embodiments, the vector can be a recombinant DNA molecule containing a nucleic acid encoding an antibody that binds to human ENTPD2 protein. “Recombinant” as used herein means that the vector, polynucleotide, polypeptide or cell is the product of various combinations of cloning, restriction or ligation steps (e.g. relating to a polynucleotide or polypeptide comprised therein), and/or other procedures that result in a construct that is distinct from a product found in nature. A recombinant virus or vector is a viral particle comprising a recombinant polynucleotide. The terms respectively include replicates of the original polynucleotide construct and progeny of the original virus construct.

[0887] The recombinant vector typically includes one or more regulatory sequences operatively linked to the nucleic acid sequence to be expressed. The term “regulatory sequence” includes promoters, enhancers, and other expression control elements (e.g., polyadenylation signals). Regulatory sequences include those which direct constitutive expression of a nucleotide sequence, as well as tissue-specific regulatory and/or inducible sequences. Expression vectors can also include elements designed to optimize messenger RNA stability and translatability in host cells, and/or drug selection markers for establishing permanent, stable cell clones expressing an antibody that binds to human ENTPD2 protein. The design of the expression vector can depend on such factors as the choice of the host cell to be transformed, the level of expression of protein desired, and the like. General methods for generating such recombinant expression vectors can be found in Sambrook and Russell eds. (2001) Molecular Cloning: A Laboratory Manual, 3rd edition; the series Ausubel et al. eds. (2007 with updated through 2010) Current Protocols in Molecular Biology, among others known in the art.

[0888] A “promoter” is a control sequence that is a region of a nucleic acid sequence at which initiation and rate of transcription are controlled. It may contain genetic elements at which regulatory proteins and molecules may bind such as RNA polymerase and other transcription factors. The phrases “operatively positioned”, “operatively linked”, “under control”, and “under transcriptional control” mean that a promoter is in a correct functional location and/or orientation in relation to a nucleic acid sequence to control transcriptional initiation and/or expression of that sequence. A promoter may or may not be used in conjunction with an “enhancer”, which refers to a cis-acting regulatory sequence involved in the transcriptional activation of a nucleic acid sequence.

[0889] A promoter may be one naturally-associated with a gene or sequence, as may be obtained by isolating the 5′ non-coding sequences located upstream of the coding segment and/or exon. Such a promoter can be referred to as “endogenous”. Similarly, an enhancer may be one naturally associated with a nucleic acid sequence, located either downstream or upstream of that sequence. Alternatively, certain advantages will be gained by positioning the coding nucleic acid segment under the control of a recombinant or heterologous promoter, which refers to a promoter that is not normally associated with a nucleic acid sequence in its natural environment. A recombinant or heterologous enhancer refers also to an enhancer not normally associated with a nucleic acid sequence in its natural environment. Such promoters or enhancers may include promoters or enhancers of other genes, and promoters or enhancers isolated from any other prokaryotic, viral, or eukaryotic cell, and promoters or enhancers not “naturally-occurring”, i.e., containing different elements of different transcriptional regulatory regions and/or mutations that alter expression. In addition to producing nucleic acid sequences of promoters and enhancers synthetically, sequences may be produced using recombinant cloning and/or nucleic acid amplification technology, for example PCR, in connection with the compositions disclosed herein (see U.S. Pat. Nos. 4,683,202, 5,928,906). Furthermore, it is contemplated the control sequences that direct transcription and/or expression of sequences within non-nuclear organelles such as mitochondria, chloroplasts, and the like, can be employed as well.

[0890] The promoters employed can be constitutive, inducible, synthetic, tissue- or cell-specific, and/or useful under the appropriate conditions to direct high level expression of the introduced DNA segment, such as is advantageous in the large-scale production of recombinant proteins and/or peptides. In addition, other regulatory elements may also be incorporated to improve expression of a nucleic acid encoding an antibody that binds to human ENTPD2 protein, e.g., enhancers, ribosomal binding site, transcription termination sequences, and the like.

[0891] In some embodiments, a constitutive promoter is employed to provide constant expression of an anti-human ENTPD2 antibody. Examples of a constitutive promoter include, but not limited to, the immediate early cytomegalovirus (CMV) promoter, the simian virus 40 (SV40) early promoter, mouse mammary tumor virus (MMTV) promoter, human immunodeficiency virus (HIV) long terminal repeat (LTR) promoter, MoMuLV promoter, an avian leukemia virus promoter, an Epstein-Barr virus immediate early promoter, a Rous sarcoma virus promoter, as well as human gene promoters such as, but not limited to, the actin promoter, the myosin promoter, the elongation factor-1□ promoter, the hemoglobin promoter, and the creatine kinase promoter.

[0892] Inducible promoters are also contemplated as part of the present disclosure. The use of an inducible promoter provides a molecular switch capable of turning on expression of the polynucleotide sequence which it is operatively linked when such expression is desired, or turning off the expression when expression is not desired. Examples of inducible promoters include, but are not limited to a metallothionine promoter, a glucocorticoid promoter, a progesterone promoter, and a tetracycline promoter.

[0893] In some embodiments, a tissue- or cell-specific promoter is employed to provide expression of an anti-human ENTPD2 antibody only in specific tissues or cells. The identity of tissue- or cell-specific promoters or elements, as well as assays to characterize their activities, is well known to those of skill in the art. Examples include the human LIMK2 gene (Nomoto et al. 1999, Gene, 236(2):259-271), the somatostatin receptor 2 gene (Kraus et al., 1998, FEES Lett., 428(3): 165-170), murine epididymal retinoic acid-binding gene (Lareyre et al., 1999, J. Biol. Chem., 274(12):8282-8290), human CD4 (Zhao-Emonet et al., 1998, Biochirn. Biophys. Acta, 1442(2-3): 109-119), mouse alpha2 (XI) collagen (Tsumaki, et al., 1998, J. Biol. Chem., 273(36):22861-22864), DIA dopamine receptor gene (Lee, et al., 1997, J. Auton. Nerv. Syst., 74(2-3):86-90), insulin-like growth factor II (Wu et al., 1997, Biochem. Biophys. Res. Commun., 233(1):221-226), human platelet endothelial cell adhesion molecule-1 (Almendro et al., 1996, J. Immunol., 157(12):5411-5421), muscle creatine kinase (MCK) promoter (Wang et al., Gene Ther. 2008 Nov;15(22):1489-99).

[0894] In some embodiments, a synthetic promoter is employed to provide expression of an anti-human ENTPD2 antibody. Synthetic promoters can greatly exceed the transcriptional potencies of natural promoters. For example, the synthetic promoters that do not get shut off or reduced in activity by the endogenous cellular machinery or factors can be selected. Other elements, including trans-acting factor binding sites and enhancers may be inserted into the synthetic promoter to improve transcriptional efficiency. Synthetic promoters can be rationally designed and chemically synthesized to combine the best features of both synthetic and biological promoters. Synthetic oligos are annealed and ligated through several processes to generate the full-length chemically synthesized promoter. Synthetic promters can be inducible or cell-type specific promoters.

[0895] A specific initiation signal also may be required for efficient translation of coding sequences. These signals include the ATG initiation codon or adjacent sequences. Exogenous translational control signals, including the ATG initiation codon, may need to be provided. One of ordinary skill in the art would readily be capable of determining this and providing the necessary signals. It is well known that the initiation codon must be “in-frame” with the reading frame of the desired coding sequence to ensure translation of the entire insert. The exogenous translational control signals and initiation codons can be either natural or synthetic. The efficiency of expression may be enhanced by the inclusion of appropriate transcription enhancer elements.

[0896] Expression can employ any appropriate host cells known in the art, for example, mammalian host cells, bacterial host cells, yeast host cells, insect host cells, etc. Both prokaryotic and eukaryotic expression systems are widely available. In some embodiments, the expression system is a mammalian cell expression, such as a CHO cell expression system. In some embodiments, a nucleic acid may be codon-optimized to facilitate expression in a desired host cell. It will be important to employ a promoter and/or enhancer that effectively directs the expression of the DNA segment in the cell type, organelle, and organism chosen for expression. Those of skill in the art of molecular biology generally know the use of promoters, enhancers, and cell type combinations for protein expression, for example, see Sambrook et al. (2001).

[0897] Most transcribed eukaryotic RNA molecules will undergo RNA splicing to remove introns from the primary transcripts. Vectors containing genomic eukaryotic sequences may require donor and/or acceptor splicing sites to ensure proper processing of the transcript for protein expression (see Chandler et al., 1997, Proc. Natl. Acad. Sci. USA, 94(8):3596-601).

[0898] The vectors or constructs of the present disclosure will generally comprise at least one termination signal. A “termination signal” or “terminator” is comprised of the DNA sequences involved in specific termination of a RNA transcript by a RNA polymerase. Thus, in certain embodiments a termination signal that ends the production of a RNA transcript is contemplated. A terminator may be necessary in vivo to achieve desirable message levels. In eukaryotic systems, the terminator region may also comprise specific DNA sequences that permit site-specific cleavage of the new transcript so as to expose a polyadenylation site. This signals a specialized endogenous polymerase to add a stretch of about 200 A residues (poly A) to the 3′ end of the transcript. RNA molecules modified with this polyA tail appear to more stable and are translated more efficiently. Thus, in other embodiments involving eukaryotes, it is preferred that the terminator comprises a signal for the cleavage of the RNA, and it is more preferred that the terminator signal promotes polyadenylation of the message. The terminator and/or polyadenylation site elements can serve to enhance message levels and/or to minimize read through from the cassette into other sequences. Terminators contemplated for use in the disclosure include any known terminator of transcription described herein or known to one of ordinary skill in the art, including but not limited to, for example, the termination sequences of genes, such as for example the bovine growth hormone terminator or viral termination sequences, such as for example the SV40 terminator. In certain embodiments, the termination signal may be a lack of transcribable or translatable sequence, such as due to a sequence truncation.

[0899] In expression, particularly eukaryotic expression, one will typically include a polyadenylation signal to effect proper polyadenylation of the transcript. The nature of the polyadenylation signal is not believed to be crucial to the successful practice of the disclosure, and/or any such sequence may be employed. Preferred embodiments include the SV40 polyadenylation signal and/or the bovine growth hormone polyadenylation signal, convenient and/or known to function well in various target cells. Polyadenylation may increase the stability of the transcript or may facilitate cytoplasmic transport.

[0900] To propagate a vector in a host cell, it may contain one or more origins of replication sites (often termed “ori”), which is a specific nucleic acid sequence at which replication is initiated. Alternatively an autonomously replicating sequence (ARS) can be employed if the host cell is yeast.

[0901] In certain embodiments of the disclosure, cells containing a nucleic acid construct of the present disclosure may be identified in vitro or in vivo by including a marker in the expression vector. Such markers would confer an identifiable change to the cell permitting easy identification of cells containing the expression vector. Generally, a selectable marker is one that confers a property that allows for selection. A positive selectable marker is one in which the presence of the marker allows for its selection, while a negative selectable marker is one in which its presence prevents its selection. An example of a positive selectable marker is a drug resistance marker.

[0902] Usually the inclusion of a drug selection marker aids in the cloning and identification of transformants, for example, genes that confer resistance to neomycin, puromycin, hygromycin, DHFR, GPT, zeocin and histidinol are useful selectable markers. In addition to markers conferring a phenotype that allows for the discrimination of transformants based on the implementation of conditions, other types of markers including screenable markers such as GFP, whose basis is colorimetric analysis, are also contemplated. Alternatively, screenable enzymes such as herpes simplex virus thymidine kinase (HSV-tk) or chloramphenicol acetyltransferase (CAT) may be utilized. One of skill in the art would also know how to employ immunologic markers, possibly in conjunction with FACS analysis. The marker used is not believed to be important, so long as it is capable of being expressed simultaneously with the nucleic acid encoding a gene product. Further examples of selectable and screenable markers are well known to one of skill in the art.

[0903] The expression vectors may also provide a secretion signal sequence position to form a fusion protein with polypeptides encoded by inserted ENTPD2-binding antibody sequences. More often, the inserted ENTPD2-binding antibody sequences are linked to a signal sequences before inclusion in the vector. Vectors to be used to receive sequences encoding ENTPD2-binding antibody light and heavy chain variable domains sometimes also encode constant regions or parts thereof. Such vectors allow expression of the variable regions as fusion proteins with the constant regions thereby leading to production of intact antibodies and antigen-binding fragments thereof. Typically, such constant regions are human.

[0904] Generation of an expression vector can utilize a vector that includes a multiple cloning site (MCS), which is a nucleic acid region that contains multiple restriction enzyme sites, any one of which can be used in conjunction with standard recombinant technology to digest the vector. See Carbonelli et al., 1999, Levenson et al., 1998, and Cocea, 1997. “Restriction enzyme digestion” refers to catalytic cleavage of a nucleic acid molecule with an enzyme that functions only at specific locations in a nucleic acid molecule. Many one of these restriction enzymes are commercially available. Use of such enzymes is widely understood by those of skill in the art. Frequently, a vector is linearized or fragmented using a restriction enzyme that cuts within the MCS to enable exogenous sequences to be ligated to the vector. “Ligation” refers to the process of forming phosphodiester bonds between two nucleic acid fragments, which may or may not be contiguous with each other. Techniques involving restriction enzymes and ligation reactions are well known to those of skill in the art of recombinant technology.

[0905] Methods for introducing expression vectors containing the polynucleotide sequences of interest vary depending on the type of cellular host. For example, calcium chloride transfection is commonly utilized for prokaryotic cells, whereas calcium phosphate treatment or electroporation may be used for other cellular hosts (see generally Sambrook et al., supra). Other methods include, e.g., electroporation, calcium phosphate treatment, liposome-mediated transformation, injection and microinjection, ballistic methods/gene gun, virosomes, immunoliposomes, polycation:nucleic acid conjugates, naked DNA, artificial virions, fusion to the herpes virus structural protein VP22, agent-enhanced uptake of DNA, ex vivo transduction, protoplast fusion, retroviral transduction, viral transfection, lipid based transfection or other conventional techniques. In the case of protoplast fusion, the cells are grown in media and screened for the appropriate activity. For long-term, high-yield production of recombinant proteins, stable expression will often be desired. For example, cell lines which stably express polypeptides can be prepared using expression vectors which contain viral origins of replication or endogenous expression elements and a selectable marker gene. Following the introduction of the vector, cells may be allowed to grow for 1-2 days in an enriched media before they are switched to selective media. The purpose of the selectable marker is to confer resistance to selection, and its presence allows growth of cells which successfully express the introduced sequences in selective media. Resistant, stably transfected cells can be proliferated using tissue culture techniques appropriate to the cell type. Methods and conditions for culturing the resulting transfected cells and for recovering the antibody molecule produced are known to those skilled in the art, and may be varied or optimized depending upon the specific expression vector and mammalian host cell employed, based upon the present description.

[0906] Also provided herein are cells that include any one of the expression vectors described herein. In some embodiments, the disclosure features a host cell that includes a nucleic acid molecule described herein. Such cells can be a host cell or a therapeutic cell. The terms “host cell” and “recombinant host cell” are used interchangeably herein, which refer to not only to the particular subject cell but to the progeny or potential progeny of such a cell. Because certain modifications may occur in succeeding generations due to either mutation or environmental influences, such progeny may not, in fact, be identical to the parent cell, but are still included within the scope of the term as used herein.

[0907] In one embodiment, the host cells are genetically engineered to comprise nucleic acids encoding the antibody molecule. In one embodiment, the host cells are genetically engineered by using an expression cassette. The phrase “expression cassette” refers to nucleotide sequences, which are capable of effectingexpression of a gene in hosts compatible with such sequences. Such cassettes may include a promoter, an open reading frame with or without introns, and a termination signal. Additional factors necessary or helpful in effecting expression may also be used, such as, for example, an inducible promoter.

[0908] The host cells for harboring and expressing the ENTPD2-binding antibody chains can be can be, but is not limited to, a eukaryotic cell or a prokaryotic cell, such as a bacterial cell, an insect cell, or a human cell. E. coli is one prokaryotic host useful for cloning and expressing the polynucleotides of the present invention. Other microbial hosts suitable for use include bacilli, such as Bacillus subtilis, and other enterobacteriaceae, such as Salmonella, Serratia, and various Pseudomonas species. In these prokaryotic hosts, one can also make expression vectors, which typically contain expression control sequences compatible with the host cell (e.g., an origin of replication). In addition, any number of a variety of well-known promoters will be present, such as the lactose promoter system, a tryptophan (trp) promoter system, a beta-lactamase promoter system, or a promoter system from phage lambda. The promoters typically control expression, optionally with an operator sequence, and have ribosome binding site sequences and the like, for initiating and completing transcription and translation. Other microbes, such as yeast, can also be employed to express ENTPD2-binding polypeptides of the invention. Insect cells in combination with baculovirus vectors can also be used. Suitable insect cells include, but are not limited to, Sf9 cells.

[0909] In one embodiment, mammalian host cells are used to express and produce the ENTPD2-binding antibodies of the present invention. For example, they can be either a hybridoma cell line expressing endogenous immunoglobulin genes (e.g., the 1D6.C9 myeloma hybridoma cell) or a mammalian cell line harboring an exogenous expression vector (e.g., the SP2/0 myeloma cell). These include any normal mortal or normal or abnormal immortal animal or human cell. For example, a number of suitable host cell lines capable of secreting intact immunoglobulins have been developed including the CHO cell lines, various Cos cell lines, HeLa cells, myeloma cell lines, transformed B-cells and hybridomas. The use of mammalian tissue cell culture to express polypeptides is discussed generally in, e.g., Winnacker, From Genes to Clones, VCH Publishers, N.Y., N.Y., 1987. Expression vectors for mammalian host cells can include expression control sequences, such as an origin of replication, a promoter, and an enhancer (see, e.g., Queen, et al., Immunol. Rev. 89:49-68, 1986), and necessary processing information sites, such as ribosome binding sites, RNA splice sites, polyadenylation sites, and transcriptional terminator sequences. These expression vectors usually contain promoters derived from mammalian genes or from mammalian viruses. Suitable promoters may be constitutive, cell type-specific, stage-specific, and/or modulatable or regulatable. Useful promoters include, but are not limited to, the metallothionein promoter, the constitutive adenovirus major late promoter, the dexamethasone-inducible MMTV promoter, the SV40 promoter, the MRP pol III promoter, the constitutive MPSV promoter, the tetracycline-inducible CMV promoter (such as the human immediate-early CMV promoter), the constitutive CMV promoter, and promoter-enhancer combinations known in the art.

[0910] A host cell can be used to produce or express an antibody that binds to human ENTPD2 protein. Accordingly, the disclosure also features methods for producing an antibody that binds to human ENTPD2 protein using a host cell. In one embodiment, the method includes culturing the host cell (into which a recombinant expression vector encoding the antibody has been introduced) in a suitable medium, such that the antibody that binds to human ENTPD2 protein is produced. In another embodiment, the method further includes isolating the antibody from the medium or the host cell. Suitable eukaryotic cells include, but are not limited to, Vero cells, HeLa cells, COS cells, CHO cells, HEK293 cells, BHK cells and MDCKII cells.

### Producing Monoclonal Antibodies

[0911] Monoclonal antibodies (mAbs) can be produced by a variety of techniques, including conventional monoclonal antibody methodology, e.g., the standard somatic cell hybridization technique of Kohler and Milstein, 1975 Nature 256: 495. Many techniques for producing monoclonal antibody can be employed e.g., viral or oncogenic transformation of B lymphocytes.

[0912] An animal system for preparing hybridomas is the murine system. Hybridoma production in the mouse is a well established procedure. Immunization protocols and techniques for isolation of immunized splenocytes for fusion are known in the art. Fusion partners (e.g., murine myeloma cells) and fusion procedures are also known.

[0913] In some embodiments, the antibodies of the invention are humanized monoclonal antibodies. Chimeric or humanized antibodies and antigen-binding fragments thereof of the present invention can be prepared based on the sequence of a murine monoclonal antibody prepared as described above. DNA encoding the heavy and light chain immunoglobulins can be obtained from the murine hybridoma of interest and engineered to contain non-murine (e.g., human) immunoglobulin sequences using standard molecular biology techniques. For example, to create a chimeric antibody, the murine variable regions can be linked to human constant regions using methods known in the art (see e.g., U.S. Pat. No. 4,816,567 to Cabilly et al.). To create a humanized antibody, the murine CDR regions can be inserted into a human framework using methods known in the art. See e.g., U.S. Pat. No. 5,225,539 to Winter, and U.S. Pat. Nos. 5,530,101; 5,585,089; 5,693,762 and 6,180,370 to Queen et al.

[0914] In some embodiments, the antibodies of the invention are human monoclonal antibodies. Such human monoclonal antibodies directed against ENTPD2 can be generated using transgenic or transchromosomic mice carrying parts of the human immune system rather than the mouse system. These transgenic and transchromosomic mice include mice referred to herein as HuMAb mice and KM mice, respectively, and are collectively referred to herein as “human Ig mice”.

[0915] The HuMAb Mouse® (Medarex, Inc.) contains human immunoglobulin gene miniloci that encode un-rearranged human heavy (mu and gamma) and kappa light chain immunoglobulin sequences, together with targeted mutations that inactivate the endogenous mu and kappa chain loci (see e.g., Lonberg, et al., 1994 Nature 368 (6474): 856-859). Accordingly, the mice exhibit reduced expression of mouse IgM or K, and in response to immunization, the introduced human heavy and light chain transgenes undergo class switching and somatic mutation to generate high affinity human IgG-kappa monoclonal (Lonberg, N. et al., 1994 supra; reviewed in Lonberg, N., 1994 Handbook of Experimental Pharmacology 113:49-101; Lonberg, N. and Huszar, D., 1995 Intern. Rev. Immunol. 13: 65-93, and Harding, F. and Lonberg, N., 1995 Ann. N.Y. Acad. Sci. 764:536-546). The preparation and use of HuMAb mice, and the genomic modifications carried by such mice, is further described in Taylor, L. et al., 1992 Nucleic Acids Research 20:6287-6295; Chen, J. et al., 1993 International Immunology 5: 647-656; Tuaillon et al., 1993 Proc. Natl. Acad. Sci. USA 94:3720-3724; Choi et al., 1993 Nature Genetics 4:117-123; Chen, J. et al., 1993 EMBO J. 12: 821-830; Tuaillon et al., 1994 J. Immunol. 152:2912-2920; Taylor, L. et al., 1994 International Immunology 579-591; and Fishwild, D. et al., 1996 Nature Biotechnology 14: 845-851. See further, U.S. Pat. Nos. 5,545,806; 5,569,825; 5,625,126; 5,633,425; 5,789,650; 5,877,397; 5,661,016; 5,814,318; 5,874,299; and 5,770,429; all to Lonberg and Kay; U.S. Pat. No. 5,545,807 to Surani et al.; PCT Publication Nos. WO 92103918, WO 93/12227, WO 94/25585, WO 97113852, WO 98/24884 and WO 99/45962, all to Lonberg and Kay; and PCT Publication No. WO 01/14424 to Korman et al.

[0916] In some embodiments, human antibodies can be raised using a mouse that carries human immunoglobulin sequences on transgenes and transchomosomes such as a mouse that carries a human heavy chain transgene and a human light chain transchromosome. Such mice, referred to herein as “KM mice,” are described in detail in PCT Publication WO 02/43478 to Ishida et al.

[0917] Still further, alternative transgenic animal systems expressing human immunoglobulin genes are available in the art and can be used to raise ENTPD2-binding antibodies and antigen-binding fragments thereof. For example, an alternative transgenic system referred to as the Xenomouse (Abgenix, Inc.) can be used. Such mice are described in, e.g., U.S. Pat. Nos. 5,939,598; 6,075,181; 6,114,598; 6,150,584 and 6,162,963 to Kucherlapati et al.

[0918] Moreover, alternative transchromosomic animal systems expressing human immunoglobulin genes are available in the art and can be used to raise ENTPD2-binding antibodies of the invention. For example, mice carrying both a human heavy chain transchromosome and a human light chain transchromosome, referred to as “TC mice” can be used; such mice are described in Tomizuka et al., 2000 Proc. Natl. Acad. Sci. USA 97:722-727. Furthermore, cows carrying human heavy and light chain transchromosomes have been described in the art (Kuroiwa et al., 2002 Nature Biotechnology 20:889-894) and can be used to raise ENTPD2 binding antibodies of the invention.

[0919] Human monoclonal antibodies can also be prepared using phage display methods for screening libraries of human immunoglobulin genes. Such phage display methods for isolating human antibodies are established in the art or described in the examples below. See for example: U.S. Pat. Nos. 5,223,409; 5,403,484; and 5,571,698 to Ladner et al; U.S. Pat. Nos. 5,427,908 and 5,580,717 to Dower et al; U.S. Pat. Nos. 5,969,108 and 6,172,197 to McCafferty et al; and U.S. Pat. Nos. 5,885,793; 6,521,404; 6,544,731; 6,555,313; 6,582,915 and 6,593,081 to Griffiths et al.

[0920] Human monoclonal antibodies of the invention can also be prepared using SCID mice into which human immune cells have been reconstituted such that a human antibody response can be generated upon immunization. Such mice are described in, for example, U.S. Pat. Nos. 5,476,996 and 5,698,767 to Wilson et al.

### Methods of Engineering Modified Antibodies

[0921] As discussed above, the ENTPD2-binding antibodies having VH and VL sequences or full length heavy and light chain sequences shown herein can be used to create new ENTPD2-binding antibodies by modifying full length heavy chain and/or light chain sequences, VH and/or VL sequences, or the constant region(s) attached thereto. Thus, in another aspect of the invention, the structural features of ENTPD2-binding antibody of the invention are used to create structurally related ENTPD2-binding antibodies that retain at least one functional property of the antibodies and antigen-binding fragments thereof of the invention, such as binding to and inhibit human ENTPD2.

[0922] For example, one or more CDR regions of the antibodies and antigen-binding fragments thereof of the present invention, or mutations thereof, can be combined recombinantly with known framework regions and/or other CDRs to create additional, recombinantly-engineered, ENTPD2-binding antibodies and antigen-binding fragments thereof of the invention, as discussed above. Other types of modifications include those described in the previous section. The starting material for the engineering method is one or more of the VH and/or VL sequences provided herein, or one or more CDR regions thereof. To create the engineered antibody, it is not necessary to actually prepare (i.e., express as a protein) an antibody having one or more of the VH and/or VL sequences provided herein, or one or more CDR regions thereof. Rather, the information contained in the sequence (s) is used as the starting material to create a “second generation” sequence(s) derived from the original sequence(s) and then the “second generation” sequence(s) is prepared and expressed as a protein.

[0923] The altered antibody sequence can also be prepared by screening antibody libraries having fixed CDR3 sequences or minimal essential binding determinants as described in US20050255552 and diversity on CDR1 and CDR2 sequences. The screening can be performed according to any screening technology appropriate for screening antibodies from antibody libraries, such as phage display technology.

[0924] Standard molecular biology techniques can be used to prepare and express the altered antibody sequence. The antibody encoded by the altered antibody sequence (s) is one that retains one, some or all of the functional properties of the ENTPD2-binding antibodies described herein, which functional properties include, but are not limited to, specifically binding to and stabilize human ENTPD2 protein.

[0925] The functional properties of the altered antibodies can be assessed using standard assays available in the art and/or described herein, such as those set forth in the Examples (e.g., ELISAs).

[0926] In some embodiments, the methods of engineering antibodies and antigen-binding fragments thereof of the invention, mutations can be introduced randomly or selectively along all or part of an ENTPD2-binding antibody coding sequence and the resulting modified ENTPD2-binding antibodies can be screened for binding activity and/or other functional properties as described herein. Mutational methods have been described in the art. For example, PCT Publication WO 02/092780 describes methods for creating and screening antibody mutations using saturation mutagenesis, synthetic ligation assembly, or a combination thereof. Alternatively, PCT Publication WO 03/074679 describes methods of using computational screening methods to optimize physiochemical properties of antibodies.

### Characterization of the Antibodies

[0927] The antibodies and antigen-binding fragments thereof of the invention can be characterized by various functional assays. For example, they can be characterized by their ability to bind to the ENTPD2 protein (e.g., human ENTPD2 protein).

[0928] The ability of an antibody to bind to ENTPD2 (e.g., human ENTPD2 protein) can be detected by labelling the antibody of interest directly, or the antibody may be unlabeled and binding detected indirectly using various sandwich assay formats known in the art.

[0929] In some embodiments, the ENTPD2-binding antibodies and antigen-binding fragments thereof of the invention block or compete with binding of a reference ENTPD2-binding antibody to ENTPD2 protein (e.g., human ENTPD2 protein). These can be fully human or humanized ENTPD2-binding antibodies described above. They can also be other human, mouse, chimeric or humanized ENTPD2-binding antibodies which bind to the same epitope as the reference antibody. The capacity to block or compete with the reference antibody binding indicates that ENTPD2-binding antibody under test binds to the same or similar epitope as that defined by the reference antibody, or to an epitope which is sufficiently proximal to the epitope bound by the reference ENTPD2-binding antibody. Such antibodies are especially likely to share the advantageous properties identified for the reference antibody. The capacity to block or compete with the reference antibody may be determined by, e.g., a competition binding assay. With a competition binding assay, the antibody under test is examined for ability to inhibit specific binding of the reference antibody to a common antigen, such as ENTPD2 protein (e.g., human ENTPD2 protein). A test antibody competes with the reference antibody for specific binding to the antigen if an excess of the test antibody substantially inhibits binding of the reference antibody. Substantial inhibition means that the test antibody reduces specific binding of the reference antibody usually by at least 10%, 25%, 50%, 75%, or 90%.

[0930] There are a number of known competition binding assays that can be used to assess competition of an antibody with a reference antibody for binding to a particular protein, in this case, ENTPD2 (e.g., human ENTPD2 protein). These include, e.g., solid phase direct or indirect radioimmunoassay (RIA), solid phase direct or indirect enzyme immunoassay (EIA), sandwich competition assay (see Stahli et al., Methods in Enzymology 9:242-253, 1983); solid phase direct biotin-avidin EIA (see Kirkland et al., J. Immunol. 137:3614-3619, 1986); solid phase direct labeled assay, solid phase direct labeled sandwich assay (see Harlow & Lane, supra); solid phase direct label RIA using I-125 label (see Morel et al., Molec. Immunol. 25:7-15, 1988); solid phase direct biotin-avidin EIA (Cheung et al., Virology 176:546-552, 1990); and direct labeled RIA (Moldenhauer et al., Scand. J. Immunol. 32:77-82, 1990). Typically, such an assay involves the use of purified antigen bound to a solid surface or cells bearing either of these, an unlabelled test ENTPD2-binding antibody and a labelled reference antibody. Competitive inhibition is measured by determining the amount of label bound to the solid surface or cells in the presence of the test antibody. Usually the test antibody is present in excess. Antibodies identified by competition assay (competing antibodies) include antibodies binding to the same epitope as the reference antibody and antibodies binding to an adjacent epitope sufficiently proximal to the epitope bound by the reference antibody for steric hindrance to occur.

[0931] To determine if the selected ENTPD2-binding monoclonal antibodies bind to unique epitopes, each antibody can be biotinylated using commercially available reagents (e.g., reagents from Pierce, Rockford, Ill.). Competition studies using unlabeled monoclonal antibodies and biotinylated monoclonal antibodies can be performed using ENTPD2 protein coated-ELISA plates. Biotinylated MAb binding can be detected with a strepavidin-alkaline phosphatase probe. To determine the isotype of a purified ENTPD2-binding antibody, isotype ELISA can be performed. For example, wells of microtiter plates can be coated with 1 microgram/ml of anti-human IgG overnight at 4° C. After blocking with 1% BSA, the plates are reacted with 1 microgram/ml or less of the monoclonal ENTPD2-binding antibody or purified isotype controls, at ambient temperature for one to two hours. The wells can then be reacted with either human IgG1 or human IgM-specific alkaline phosphatase-conjugated probes. Plates are then developed and analyzed so that the isotype of the purified antibody can be determined.

[0932] To demonstrate binding of monoclonal ENTPD2-binding antibodies to live cells expressing ENTPD2 protein (e.g., human ENTPD2 protein), flow cytometry can be used. Briefly, cell lines expressing ENTPD2 (grown under standard growth conditions) can be mixed with various concentrations of ENTPD2-binding antibody in PBS containing 0.1% BSA and 10% fetal calf serum, and incubated at 37° C. for 1 hour. After washing, the cells are reacted with fluorescein-labeled anti-human IgG antibody under the same conditions as the primary antibody staining. The samples can be analyzed by FACScan instrument using light and side scatter properties to gate on single cells. An alternative assay using fluorescence microscopy may be used (in addition to or instead of) the flow cytometry assay. Cells can be stained exactly as described above and examined by fluorescence microscopy. This method allows visualization of individual cells, but may have diminished sensitivity depending on the density of the antigen.

[0933] ENTPD2-binding antibodies and antigen-binding fragments thereof of the invention can be further tested for reactivity with ENTPD2 protein (e.g., human ENTPD2 protein) or antigenic fragment by Western blotting. Briefly, purified ENTPD2 protein (e.g., human ENTPD2 protein) or fusion proteins, or cell extracts from cells expressing ENTPD2 can be prepared and subjected to sodium dodecyl sulfate polyacrylamide gel electrophoresis. After electrophoresis, the separated antigens are transferred to nitrocellulose membranes, blocked with 10% fetal calf serum, and probed with the monoclonal antibodies to be tested. Human IgG binding can be detected using anti-human IgG alkaline phosphatase and developed with BCIP/NBT substrate tablets (Sigma Chem. Co., St. Louis, Mo.).

[0934] ENTPD2-binding antibodies and antigen-binding fragments thereof of the invention can be further tested for their abilities to modulate one or more ENTPD2 activities/functions.

[0935] ENTPD2-binding antibodies and antigen-binding fragments thereof of the invention can also be tested using any of the methods or assays described in the Examples.

### Methods of Treatment and Therapeutic Use

[0936] The antibodies disclosed herein have numerous in vitro and in vivo diagnostic and therapeutic utilities involving the diagnosis and treatment of disorders with ENTPD2-dependent pathophysiology. For example, these molecules can be administered to cells in culture, in vitro or ex vivo, or to human subjects, e.g., in vivo, to treat, prevent and to diagnose a variety disorders with ENTPD2-dependent pathophysiology. Accordingly, in one aspect provided herein are methods of treating a cancer in a subject in need thereof by administering to the subject a combination comprising a therapeutically effective amount of an anti-ENTPD2 antibody or antigen binding fragment thereof described herein and a therapeutically effective amount of an anti-CD73 antibody or antigen binding fragment thereof described herein, nucleic acids encoding such an antibodies or antigen binding fragments, vector(s) comprising a nucleic acid encoding such antibodies or antigen binding fragments, a cell comprising such nucleic acids or vectors, or a pharmaceutical composition comprising such antibodies or antigen binding fragments, nucleic acids, vectors or cells. In one aspect, the invention provides a method of inhibiting or reducing growth of tumor cells in a subject comprising administering to the subject a therapeutically effective amount of an anti-human ENTPD2 antibody as disclosed herein and a a therapeutically effective amount of an anti-human CD73 antibody as disclosed herein.

[0937] In another aspect, a method of treating a subject, e.g., reducing or ameliorating, a hyperproliferative condition or disorder (e.g., a cancer), e.g., solid tumor, a hematological cancer, soft tissue tumor, or a metastatic lesion, in a subject is provided.

[0938] Accordingly, in one embodiment, the invention provides a method of inhibiting growth of tumor cells in a subject, comprising administering to the subject a therapeutically effective amount of one or more anti-human ENTPD2 antibody molecule or functional fragment thereof as described herein and a therapeutically effective amount of one or more anti-human CD73 antibody molecule or functional fragment thereof as described herein; optionally in combination with other agents, e.g., therapeutic agents, or therapeutic modalities.

[0939] In some embodiments, such methods can further comprise a step of assaying expression levels of ENTPD2 in a sample obtained from a subject, e.g., tissue biopsy of the subject.

[0940] The term cancer is meant to include all types of cancerous growths or oncogenic processes, metastatic tissues or malignantly transformed cells, tissues, or organs, irrespective of histopathologic type or stage of invasiveness. Examples of cancerous disorders include, but are not limited to, solid tumors, soft tissue tumors, and metastatic lesions. Examples of solid tumors include malignancies, e.g., sarcomas, adenocarcinomas, and carcinomas, of the various organ systems, such as those affecting liver, lung, breast, lymphoid, gastrointestinal (e.g., colon), genitourinary tract (e.g., renal, urothelial cells), prostate and pharynx. Adenocarcinomas include malignancies such as most colon cancers, (e.g., MSS colorectal cancer), cholangiocarcinoma (intrahepatic or extrahepatic), pancreatic cancer, esophageal cancer, esophageal gastric junction (EGJ) cancer, or gastric cancer, rectal cancer, renal-cell carcinoma, liver cancer (hepatocarcinoma, e.g., an advanced hepatocarcinoma, with or without a viral infection, e.g., a chronic viral hepatitis), non-small cell carcinoma of the lung, cancer of the small intestine and cancer of the esophagus. Squamous cell carcinomas include malignancies, e.g., in the lung, esophagus, skin, head and neck region, oral cavity, anus, and cervix.

[0941] Metastatic lesions of the aforementioned cancers can also be treated or prevented using the methods and combinations of the invention.

[0942] Exemplary cancers whose growth can be inhibited using the antibodies molecules disclosed herein include cancers typically responsive to immunotherapy. Non-limiting examples of preferred cancers for treatment include gastrointestinal cancer (e.g. gastric (stomach) cancer, colorectal cancer (CRC)) and cancer of the esophagus (e.g. esophageal squamous cell carcinoma (ESCC)). Additionally, refractory or recurrent malignancies can be treated using the antibody molecules described herein.

[0943] Examples of other cancers that can be treated include lung cancer (e.g., a non-small cell lung cancer (NSCLC) (e.g., a NSCLC with squamous and/or non-squamous histology, or a NSCLC adenocarcinoma)), a melanoma (e.g., an advanced melanoma), a renal cancer (e.g., a renal cell carcinoma, e.g., clear cell renal cell carcinoma), a liver cancer, a myeloma (e.g., a multiple myeloma), a prostate cancer, a breast cancer (e.g., a breast cancer that does not express one, two or all of estrogen receptor, progesterone receptor, or Her2/neu, e.g., a triple negative breast cancer), a pancreatic cancer, a head and neck cancer (e.g., head and neck squamous cell carcinoma (HNSCC), anal cancer, gastro-esophageal cancer, thyroid cancer, cervical cancer, a lymphoproliferative disease (e.g., a post-transplant lymphoproliferative disease) or a hematological cancer, T-cell lymphoma, a non-Hogdkin's lymphoma, or a leukemia (e.g., a myeloid leukemia), bone cancer, pancreatic cancer, skin cancer, cancer of the head or neck, cutaneous or intraocular malignant melanoma, uterine cancer, ovarian cancer, rectal cancer, anal cancer, gastro-esophageal cancer, stomach cancer, testicular cancer, uterine cancer, carcinoma of the fallopian tubes, carcinoma of the endometrium, carcinoma of the cervix, carcinoma of the vagina, carcinoma of the vulva, Hodgkin Disease, non-Hodgkin lymphoma, myeloma (e.g., multiple myeloma) cancer of the esophagus, cancer of the small intestine, cancer of the endocrine system, cancer of the thyroid gland, cancer of the parathyroid gland, cancer of the adrenal gland, sarcoma of soft tissue, cancer of the urethra, cancer of the penis, chronic or acute leukemias including acute myeloid leukemia, chronic myeloid leukemia, acute lymphoblastic leukemia, chronic lymphocytic leukemia, solid tumors of childhood, lymphocytic lymphoma, cancer of the bladder, cancer of the kidney (e.g. renal cancer, e.g., a renal cell carcinoma (RCC) (e.g., a metastatic RCC or clear cell renal cell carcinoma)), cancer of the ureter, carcinoma of the renal pelvis, neoplasm of the central nervous system (CNS), primary CNS lymphoma, tumor angiogenesis, spinal axis tumor, brain stem glioma, pituitary adenoma, Kaposi's sarcoma, epidermoid cancer, squamous cell cancer, T-cell lymphoma, environmentally induced cancers including those induced by asbestos, and combinations of said cancers.

[0944] In some embodiments, the therapies here can be used to treat a patient that has (or is identified as having) a cancer associated with an infection, e.g., a viral or bacterial infection. Exemplary cancers include cervical cancer, anal cancer, HPV-associated head and neck squamous cell cancer, HPV-associated esophageal papillomas, HHV6-associated lymphomas, EBV-associated lymphomas (including Burkitt lymphoma), Gastric MALT lymphoma, other infection-associated MALT lymphomas, HCC, and Kaposi's sarcoma.

[0945] In other embodiments, the cancer is a hematological malignancy or cancer including but is not limited to a leukemia or a lymphoma. For example, the combination of the anti-human ENTPD2 antibody molecule or a antigen-binding fragment thereof and the anti-human CD73 antibody molecule or a antigen-binding fragment thereof, optionally in combination with other agents, e.g., therapeutic agents, can be used to treat cancers and malignancies including, but not limited to, e.g., acute leukemias including but not limited to, e.g., B-cell acute lymphoid leukemia (“BALL”), T-cell acute lymphoid leukemia (“TALL”), acute lymphoid leukemia (ALL); one or more chronic leukemias including but not limited to, e.g., chronic myelogenous leukemia (CML), chronic lymphocytic leukemia (CLL); additional hematologic cancers or hematologic conditions including, but not limited to, e.g., B cell prolymphocytic leukemia, blastic plasmacytoid dendritic cell neoplasm, Burkitt's lymphoma, diffuse large B cell lymphoma, Follicular lymphoma, Hairy cell leukemia, small cell- or a large cell-follicular lymphoma, malignant lymphoproliferative conditions, MALT lymphoma, mantle cell lymphoma, Marginal zone lymphoma, multiple myeloma, myelodysplasia and myelodysplastic syndrome, non-Hodgkin lymphoma, plasmablastic lymphoma, plasmacytoid dendritic cell neoplasm, Waldenstrom macroglobulinemia, and “preleukemia” which are a diverse collection of hematological conditions united by ineffective production (or dysplasia) of myeloid blood cells, and the like.

[0946] In one embodiment, the cancer is chosen from a colon cancer (e.g., colorectal cancer (CRC) or colorectal adenocarcinoma), gastric cancer (e.g., stomach adenocarcinoma, gastric carcinoma), esophageal cancer (e.g. esophageal squamous cell carcinoma (ESCC)), lung cancer (e.g., small cell lung cancer), breast cancer (e.g., breast adenocarcinoma) or ovarian cancer.

[0947] In one embodiment, the cancer is colorectal cancer (CRC) or colorectal adenocarcinoma. In another embodiment the cancer is MSS colorectal cancer (CRC).

[0948] In another embodiment, the cancer is esophageal cancer.

[0949] In a further embodiment, the cancer is gastric cancer.

[0950] In yet another embodiment, the cancer is esophageal gastric junction (EGJ) cancer.

[0951] In yet another embodiment, the cancer is esophageal squamous cell carcinoma (ESCC).

[0952] In a further embodiment, the cancer is cholangiocarcinoma. The cholangiocarcinoma may be intrahepatic or extrahepatic.

[0953] In another embodiment, the cancer is pancreatic cancer.

[0954] In yet another embodiment, the cancer is overexpressing ENTPD2 (ENTPD2 positive/ENTPD2+) such as ENTPD2+ CRC, ENTPD2+ stomach cancer (e.g. ENTPD2 gastric cancer), ENTPD2+ esophageal squamous cell carcinoma (ENTPD2+ ESCC).

[0955] The antibody or antigen binding fragment thereof described herein, the nucleic acid encoding such an antibody or antigen binding fragment, or the vector or cell comprising a nucleic acid encoding such an antibody or antigen binding fragment, or the pharmaceutical composition comprising such an antibody or antigen binding fragment, nucleic acid, vector, or cell, can be administered to the subject through an intravenous, intratumoral or subcutaneous route. In some embodiments, such an antibody or fragment thereof, nucleic acid, vector, cell, or pharmaceutical composition, is administered intravenously.

[0956] Also provided is combination of an anti-ENTPD2 antibody or antigen binding fragment thereof described herein and an anti-CD73 antibody or antigen binding fragment described herein, a pharmaceutical composition comprising such an antibodies or antigen binding fragments, a nucleic acid encoding such antibodies or antigen binding fragments, or a vector(s) comprising a nucleic acid(s) encoding such antibodies or antigen binding fragments, for use in the treatment of a cancer.

[0957] The present disclosure also includes uses of a combination of an anti-ENTPD2 antibody or antigen binding fragment thereof described herein and an anti-CD73 antibody or antigen binding fragment described herein, a pharmaceutical composition comprising such antibodies or antigen binding fragments, nucleic acids encoding such antibodies or antigen binding fragments, or vector(s) comprising a nucleic acid(s) encoding such antibodies or antigen binding fragments, in the manufacture of a medicament for treatment of a cancer.

[0958] Combination with other Therapies

[0959] The present invention also relates to a pharmaceutical composition comprising a combination according to the invention described herein. In an embodiment the pharmaceutical composition according to the invention may be used in the treatment of a cancer. Furthermore, the combination of the anti-ENTPD2 antibodies or antigen-binding fragments thereof described herein and the anti-CD73 antibodies or antigen-binding fragments thereof described herein can additionally be combined with one or more of standard of care treatment (e.g., for a cancer), another antibody molecule, an immunomodulator (e.g., an activator of a costimulatory molecule or an inhibitor of a coinhibitory molecule); a vaccine, e.g., a therapeutic cancer vaccine; or other forms of cell therapy, as described below.

[0960] Accordingly, the methods of treating a cancer described herein with the combination of the invention of the anti-ENTPD2 antibodies or antigen-binding fragments thereof described herein and the anti-CD73 antibodies or antigen-binding fragments thereof described herein can further include administering at least one additional therapeutic agent to the subject in need of treatment. Also provided herein are methods of treating a cancer comprising administering the combination of the invention of the anti-ENTPD2 antibodies or antigen-binding fragments thereof described herein and the anti-CD73 antibodies or antigen-binding fragments thereof described herein and at least two additional therapeutic agents to the subject in need of treatment.

[0961] The term “combination” refers to either a fixed combination in one dosage unit form, or a combined administration where a compound of the present invention and at least one combination partner (e.g. at least one other drug as explained below, also referred to as “therapeutic agent(s)” or “co-agent(s)”) may be administered independently at the same time or separately within time intervals, especially where these time intervals allow that the combination partners show a cooperative, e.g. synergistic effect. In the combination according to the invention the compound of the present invention and the at least one combination partner comprise the anti-ENTPD2 antibodies or antigen-binding fragments thereof described herein and the anti-CD73 antibodies or antigen-binding fragments thereof described herein. In the combination according to the invention the anti-ENTPD2 antibodies or antigen-binding fragments thereof described herein and the anti-CD73 antibodies or antigen-binding fragments thereof described herein may be in fixed combination in one dosage unit form, or may be a combined administration where the anti-ENTPD2 antibodies or antigen-binding fragments thereof described herein and the anti-CD73 antibodies or antigen-binding fragments thereof described herein may be administered independently at the same time or separately within time intervals. The single components may be packaged in a kit or separately. One or both of the components (e.g., powders or liquids) may be reconstituted or diluted to a desired dose prior to administration. The terms “co-administration” or “combined administration” or the like as utilized herein are meant to encompass administration of the selected combination partner to a single subject in need thereof (e.g. a patient), and are intended to include treatment regimens in which the agents are not necessarily administered by the same route of administration or at the same time. In an embodiment of the combination according to the invention in which the anti-ENTPD2 antibodies or antigen-binding fragments thereof described herein and the anti-CD73 antibodies or antigen-binding fragments thereof described herein are administered by a combined administration these are administered to a single subject in need thereof (e.g. a patient), and are intended to include treatment regimens in which the anti-ENTPD2 antibodies or antigen-binding fragments thereof described herein and the anti-CD73 antibodies or antigen-binding fragments thereof described herein are not necessarily administered by the same route of administration or at the same time.

[0962] The term “fixed combination” means that the therapeutic agents, e.g. a compound of the present invention and a combination partner, are both administered to a patient simultaneously in the form of a single entity or dosage. In an embodiment of the combination of the invention the anti-ENTPD2 antibodies or antigen-binding fragments thereof described herein and the anti-CD73 antibodies or antigen-binding fragments thereof described herein are in the form of a fixed combination and are thus both administered to a patient simultaneously in the form of a single unit dosage form. The term “fixed dose combination” may be used inerchangeably with “fixed combination”. The term “non-fixed combination” means that the therapeutic agents, e.g., a compound of the present invention and at least one combination partner, are administered to a patient as separate entities either simultaneously, concurrently or sequentially with no specific time limits, wherein such administration provides therapeutically effective levels of the at least two compounds in the body of the patient. The latter also applies to cocktail therapy, e.g. the administration of three or more therapeutic agents. In an embodiment of the combination of the invention the anti-ENTPD2 antibodies or antigen-binding fragments thereof described herein and the anti-CD73 antibodies or antigen-binding fragments thereof described herein are in the form of a “non-fixed combination” such that the anti-ENTPD2 antibodies or antigen-binding fragments thereof described herein and the anti-CD73 antibodies or antigen-binding fragments thereof described herein are administered to a patient as separate entities either simultaneously, concurrently or sequentially with no specific time limits, wherein such administration provides therapeutically effective levels of the at least two compounds in the body of the patient.

[0963] The term “combination therapy” refers to the administration of two or more therapeutic agents to treat a therapeutic condition or disorder described in the present disclosure. Such administration encompasses co-administration of these therapeutic agents in a substantially simultaneous manner, such as in a single capsule having a fixed ratio of active ingredients. Alternatively, such administration encompasses co-administration in multiple, or in separate containers (e.g., tablets, capsules, powders, and liquids) for each active ingredient. Powders and/or liquids may be reconstituted or diluted to a desired dose prior to administration. In addition, such administration also encompasses use of each type of therapeutic agent in a sequential manner, either at approximately the same time or at different times. In either case, the treatment regimen will provide beneficial effects of the drug combination in treating the conditions or disorders described herein.

[0964] The combination of anti-ENTPD2 antibody molecules and anti CD73 molecules can be used in combination with other therapies. For example, the combination therapy can include a composition of the present invention, e.g. a pharmaceutical composition comprising the combination of the anti-ENTPD2 antibodies or antigen-binding fragments thereof described herein and the anti-CD73 antibodies or antigen-binding fragments thereof described herein, co-formulated with, and/or co-administered with, one or more additional therapeutic agents, e.g., one or more anti-cancer agents, cytotoxic or cytostatic agents, hormone treatment, vaccines, and/or other immunotherapies. In other embodiments, the antibody molecules are administered in combination with other therapeutic treatment modalities, including surgery, radiation, cryosurgery, and/or thermotherapy. Such combination therapies may advantageously utilize lower dosages of the administered therapeutic agents, thus avoiding possible toxicities or complications associated with the various monotherapies.

[0965] By “in combination with”, it is not intended to imply that the therapy or the therapeutic agents must be administered at the same time and/or formulated for delivery together, although these methods of delivery are within the scope described herein.

[0966] The anti-human ENTPD2 antibody or antigen binding fragment thereof and the anti-human CD73 antibody or antigen binding fragment thereof can be administered concurrently with each other, or in any order prior to, or subsequent to each other. The combination of anti-human ENTPD2 antibody molecules and anti-human CD73 antibody molecules can also be administered concurrently with, prior to, or subsequent to, at least one or more other additional therapies or therapeutic agents. The anti-human ENTPD2 antibody or antigen binding fragment thereof, the anti-human CD73 antibody or antigen binding fragment thereof and the optional at least one other agent or therapeutic protocol can be administered in any order. In general, each agent will be administered at a dose and/or on a time schedule determined for that agent. It will further be appreciated that the anti-human ENTPD2 antibody or antigen binding fragment thereof, the anti-human CD73 antibody or antigen binding fragment thereof and the optional at least one additional therapeutic agent may be administered together in a single composition or administered separately in different compositions. In general, it is expected that additional therapeutic agents utilized in combination be utilized at levels that do not exceed the levels at which they are utilized individually. In some embodiments, the levels utilized in combination will be lower than those utilized individually.

[0967] The present invention pertains to a combination product for simultaneous, separate or sequential use, such as a combined preparation or a pharmaceutical fixed combination, or a combination of such preparation and combination.

[0968] Antibodies and Antigen Binding Fragments Thereof that Specifically Bind to Human CD73

[0969] The term “CD73” as used herein refers to “Cluster of Differentiation 73,” also known as 5′-nucleotidase (5′-NT) or ecto-5′-nucleotidase. The term “CD73” includes mutants, fragments, variants, isoforms, and homologs of full-length wild-type CD73. In one embodiment, the protein CD73 is encoded by the NT5E gene. Exemplary CD73 sequences are available at the Uniprot database under accession numbers Q6NZX3 and P21589. Exemplary immature CD73 amino acid sequences are provided as SEQ ID NOs: 464-466. A “CD73 monomer” refers to a polypeptide comprising an extracellular domain of CD73. In one embodiment, a CD73 monomer is a full-length CD73. A “CD73 dimer” refers to two polypeptides (e.g., two non-covalently associated polypeptides) consisting of two CD73 monomers (e.g., two identical CD73 monomers) interacting with each other to form a stable dimer, e.g., a dimer formed via protein-protein interactions between the C-terminal domains of the CD73 monomers. In one embodiment, the CD73 dimer is a naturally-occurring CD73 dimer.

[0970] Targeting the extracellular production of adenosine by CD73 may reduce the immunosuppressive effects of adenosine. Anti-CD73 antibodies have a range of activities, e.g., inhibition of CD73 ectonucleotidase activity, relief from AMP-mediated lymphocyte suppression, and inhibition of syngeneic tumor growth. Anti-CD73 antibodies can drive changes in both myeloid and lymphoid infiltrating leukocyte populations within the tumor microenvironment. These changes include, e.g., increases in CD8 effector cells and activated macrophages, as well as a reduction in the proportions of myeloid-derived suppressor cells (MDSC) and regulatory T lymphocytes. In one embodiment of the combination of the invention, an anti-CD73 antibody molecule is a full antibody molecule or an antigen-binding fragment thereof. In some embodiments, the anti-CD73 antibody molecule is chosen from any of the antibody molecules listed in Table 2. In other embodiments, the anti-CD73 antibody molecule comprises a heavy chain variable domain sequence, a light chain variable domain sequence, or both, as disclosed in Table 2. In certain embodiments, the anti-CD73 antibody molecule binds to a CD73 protein and reduces, e.g., inhibits or antagonizes, an activity of CD73, e.g., human CD73. In some embodiments, the anti-CD73 antibody molecule is described in PCT Application No. PCT/US2018/038775, published as WO 2018/237157, the content of which is hereby incorporated by reference in its entirety.

TABLE 2
Amino acid and nucleotide sequences for
exemplary anti-CD73 antibodies

| | | |
|---|---|---|
| 358 | | |
| SEQ ID NO: 360 | HCDR1 | GGSISGRYWS |
| (Combined) | | |
| SEQ ID NO: 361 | HCDR2 | YIYGTGSTNYNPSLKS |
| (Combined) | | |
| SEQ ID NO: 362 | HCDR3 | ESQESPYNNWFDP |
| (Combined) | | |
| SEQ ID NO: 363 (Kabat) | HCDR1 | GRYWS |
| SEQ ID NO: 361 (Kabat) | HCDR2 | YIYGTGSTNYNPSLKS |
| SEQ ID NO: 362 (Kabat) | HCDR3 | ESQESPYNNWFDP |
| SEQ ID NO: 364 (Chothia) | HCDR1 | GGSISGR |
| SEQ ID NO: 365 (Chothia) | HCDR2 | YGTGS |
| SEQ ID NO: 362 (Chothia) | HCDR3 | ESQESPYNNWFDP |
| SEQ ID NO: 366 (IMGT) | HCDR1 | GGSISGRY |
| SEQ ID NO: 367 (IMGT) | HCDR2 | IYGTGST |
| SEQ ID NO: 368 (IMGT) | HCDR3 | ARESQESPYNNWFDP |
| SEQ ID NO: 539 | HCDR1 | GSISGRYWS |
| (Alternative) | | |
| SEQ ID NO: 361 | HCDR2 | YIYGTGSTNYNPSLKS |
| (Alternative) | | |
| SEQ ID NO: 368 | HCDR3 | ARESQESPYNNWFDP |
| (Alternative) | | |
| SEQ ID NO: 369 | VH | QVQLQESGPGLVKPSETLSLTCTVSGGSISGRYWSWI |
| | | RQPPGKGLEWIGYIYGTGSTNYNPSLKSRVTISVDTS |
| | | KNQFSLKLSSVTAADTAVYYCARESQESPYNNWFDPW |
| | | GQGTLVTVSS |
| SEQ ID NO: 370 | DNA VH | CAAGTGCAGCTGCAGGAATCTGGCCCTGGCCTGGTCA |
| | | AGCCCTCCGAGACACTGTCCCTGACCTGCACCGTGTC |
| | | CGGCGGCTCCATCTCCGGCCGGTACTGGTCTTGGATC |
| | | CGGCAGCCTCCCGGCAAGGGCCTGGAATGGATCGGCT |
| | | ACATCTACGGCACCGGCTCCACCAACTACAACCCCAG |
| | | CCTGAAGTCCAGAGTGACCATCTCCGTGGACACCTCC |
| | | AAGAACCAGTTCTCCCTGAAGCTGTCCTCCGTGACCG |
| | | CCGCTGACACCGCCGTGTACTACTGCGCCAGAGAGTC |
| | | CCAGGAATCCCCTTACAACAATTGGTTCGACCCCTGG |
| | | GGCCAGGGCACCCTGGTCACCGTGTCCTCT |
| SEQ ID NO: 371 | 358.A | QVQLQESGPGLVKPSETLSLTCTVSGGSISGRYWSWI |
| | Heavy | RQPPGKGLEWIGYIYGTGSTNYNPSLKSRVTISVDTS |
| | Chain | KNQFSLKLSSVTAADTAVYYCARESQESPYNNWFDPW |
| | | GQGTLVTVSSASTKGPSVFPLAPCSRSTSESTAALGC |
| | | LVKDYFPEPVTVSWNSGALTSGVHTFPAVLQSSGLYS |
| | | LSSVVTVPSSSLGTKTYTCNVDHKPSNTKVDKRVESK |
| | | YGPPCPPCPAPEFLGGPSVFLFPPKPKDTLMISRTPE |
| | | VTCVVVDVSQEDPEVQFNWYVDGVEVHNAKTKPREEQ |
| | | FNSTYRVVSVLTVLHQDWLNGKEYKCKVSNKGLPSSI |
| | | EKTISKAKGQPREPQVYTLPPSQEEMTKNQVSLTCLV |
| | | KGFYPSDIAVEWESNGQPENNYKTTPPVLDSDGSFFL |
| | | YSRLTVDKSRWQEGNVFSCSVMHEALHNHYTQKSLSL |
| | | SLGX, wherein X is K or absent. |
| SEQ ID NO: 372 | 358.A | CAAGTGCAGCTGCAGGAATCTGGCCCTGGCCTGGTCA |
| | DNA | AGCCCTCCGAGACACTGTCCCTGACCTGCACCGTGTC |
| | Heavy | CGGCGGCTCCATCTCCGGCCGGTACTGGTCTTGGATC |
| | Chain | CGGCAGCCTCCCGGCAAGGGCCTGGAATGGATCGGCT |
| | | ACATCTACGGCACCGGCTCCACCAACTACAACCCCAG |
| | | CCTGAAGTCCAGAGTGACCATCTCCGTGGACACCTCC |
| | | AAGAACCAGTTCTCCCTGAAGCTGTCCTCCGTGACCG |
| | | CCGCTGACACCGCCGTGTACTACTGCGCCAGAGAGTC |
| | | CCAGGAATCCCCTTACAACAATTGGTTCGACCCCTGG |
| | | GGCCAGGGCACCCTGGTCACCGTGTCCTCTGCTTCCA |
| | | CCAAGGGCCCCTCCGTGTTCCCTCTGGCCCCTTGCTC |
| | | CCGGTCCACCTCCGAGTCTACCGCCGCTCTGGGCTGC |
| | | CTCGTGAAGGACTACTTCCCCGAGCCCGTGACCGTGT |
| | | CCTGGAACTCTGGCGCCCTGACCTCCGGCGTGCACAC |
| | | CTTCCCTGCCGTGCTGCAGTCCTCCGGCCTGTACTCC |
| | | CTGTCCAGCGTCGTGACCGTGCCCTCCTCCAGCCTGG |
| | | GCACCAAGACCTACACCTGTAACGTGGACCACAAGCC |
| | | CTCCAACACCAAAGTGGACAAGCGGGTGGAATCTAAG |
| | | TACGGCCCTCCCTGCCCTCCTTGCCCTGCCCCTGAGT |
| | | TCCTGGGCGGACCTTCCGTGTTCCTGTTCCCTCCAAA |
| | | GCCCAAGGACACCCTGATGATCTCCCGGACCCCTGAA |
| | | GTGACCTGCGTGGTGGTGGACGTGTCCCAGGAAGATC |
| | | CCGAAGTCCAGTTCAATTGGTACGTGGACGGCGTGGA |
| | | AGTGCACAACGCCAAGACCAAGCCCAGAGAGGAACAG |
| | | TTCAACTCCACCTACCGGGTGGTGTCCGTGCTGACCG |
| | | TGCTGCACCAGGACTGGCTGAACGGCAAAGAGTACAA |
| | | GTGCAAAGTGTCCAACAAGGGCCTGCCCTCCAGCATC |
| | | GAAAAGACCATCTCCAAGGCCAAGGGCCAGCCCCGCG |
| | | AGCCCCAAGTGTACACCCTGCCTCCCAGCCAGGAAGA |
| | | GATGACCAAGAATCAAGTGTCCCTGACTTGTCTGGTC |
| | | AAGGGCTTCTACCCCTCCGATATCGCCGTGGAGTGGG |
| | | AGTCCAACGGCCAGCCCGAGAACAACTACAAGACCAC |
| | | CCCTCCCGTGCTGGACTCCGACGGCTCCTTCTTCCTG |
| | | TACTCTCGGCTGACCGTGGACAAGTCCCGGTGGCAGG |
| | | AAGGCAACGTCTTCTCCTGCTCCGTGATGCACGAGGC |
| | | CCTGCACAACCACTACACCCAGAAGTCCCTGTCCCTG |
| | | TCTCTGGGCX₁X₂X₃, wherein X₁ is A, X₂ |
| | | is A, and X₃ is G; or X₁ is absent, |
| | | X₂ is absent, and X₃ is absent. |
| SEQ ID NO: 471 | 358.B | QVQLQESGPGLVKPSETLSLTCTVSGGSISGRYWSWI |
| | Heavy | RQPPGKGLEWIGYIYGTGSTNYNPSLKSRVTISVDTS |
| | Chain | KNQFSLKLSSVTAADTAVYYCARESQESPYNNWFDPW |
| | | GQGTLVTVSSASTKGPSVFPLAPCSRSTSESTAALGC |
| | | LVKDYFPEPVTVSWNSGALTSGVHTFPAVLQSSGLYS |
| | | LSSVVTVPSSSLGTKTYTCNVDHKPSNTKVDKRVESK |
| | | YGPPCPPCPAPEFEGGPSVFLFPPKPKDTLMISRTPE |
| | | VTCVVVDVSQEDPEVQFNWYVDGVEVHNAKTKPREEQ |
| | | FNSTYRVVSVLTVLHQDWLNGKEYKCKVSNKGLPSSI |
| | | EKTISKAKGQPREPQVYTLPPSQEEMTKNQVSLTCLV |
| | | KGFYPSDIAVEWESNGQPENNYKTTPPVLDSDGSFFL |
| | | YSRLTVDKSRWQEGNVFSCSVMHEALHNHYTQKSLSL |
| | | SLGX, wherein X is K or absent |
| SEQ ID NO: 373 | LCDR1 | RASQGISSWLA |
| (Combined) | | |
| SEQ ID NO: 374 | LCDR2 | AASSLQS |
| (Combined) | | |
| SEQ ID NO: 375 | LCDR3 | QQGNSFPRT |
| (Combined) | | |
| SEQ ID NO: 373 (Kabat) | LCDR1 | RASQGISSWLA |
| SEQ ID NO: 374 (Kabat) | LCDR2 | AASSLQS |
| SEQ ID NO: 375 (Kabat) | LCDR3 | QQGNSFPRT |
| SEQ ID NO: 376 (Chothia) | LCDR1 | SQGISSW |
| SEQ ID NO: 377 (Chothia) | LCDR2 | AAS |
| SEQ ID NO: 378 (Chothia) | LCDR3 | GNSFPR |
| SEQ ID NO: 379 (IMGT) | LCDR1 | QGISSW |
| SEQ ID NO: 377 (IMGT) | LCDR2 | AAS |
| SEQ ID NO: 375 (IMGT) | LCDR3 | QQGNSFPRT |
| SEQ ID NO: 373 | LCDR1 | RASQGISSWLA |
| (Alternative) | | |
| SEQ ID NO: 374 | LCDR2 | AASSLQS |
| (Alternative) | | |
| SEQ ID NO: 375 | LCDR3 | QQGNSFPRT |
| (Alternative) | | |
| SEQ ID NO: 380 | VL | DIQMTQSPSSVSASVGDRVTITCRASQGISSWLAWYQ |
| | | QKPGKAPKLLIYAASSLQSGVPSRFSGSGSGTDFTLT |
| | | ISSLQPEDFATYYCQQGNSFPRTFGGGTKVEIK |
| SEQ ID NO: 381 | DNA VL | GACATCCAGATGACCCAGAGCCCCTCCTCCGTGTCCG |
| | | CCTCCGTGGGCGACAGAGTGACCATCACCTGTCGGGC |
| | | CTCCCAGGGCATCTCCAGCTGGCTGGCCTGGTATCAG |
| | | CAGAAGCCCGGCAAGGCCCCTAAGCTGCTGATCTACG |
| | | CCGCCTCCAGCCTGCAGTCCGGCGTGCCCTCCAGATT |
| | | CTCCGGCTCTGGCTCCGGCACCGACTTCACCCTGACC |
| | | ATCAGCTCCCTGCAGCCCGAGGACTTCGCCACCTACT |
| | | ACTGCCAGCAGGGCAACTCCTTCCCTCGGACCTTCGG |
| | | CGGAGGCACCAAAGTGGAAATCAAG |
| SEQ ID NO: 382 | Light | DIQMTQSPSSVSASVGDRVTITCRASQGISSWLAWYQ |
| | Chain | QKPGKAPKLLIYAASSLQSGVPSRFSGSGSGTDFTLT |
| | | ISSLQPEDFATYYCQQGNSFPRTFGGGTKVEIKRTVA |
| | | APSVFIFPPSDEQLKSGTASVVCLLNNFYPREAKVQW |
| | | KVDNALQSGNSQESVTEQDSKDSTYSLSSTLTLSKAD |
| | | YEKHKVYACEVTHQGLSSPVTKSFNRGEC |
| SEQ ID NO: 383 | DNA | GACATCCAGATGACCCAGAGCCCCTCCTCCGTGTCCG |
| | Light | CCTCCGTGGGCGACAGAGTGACCATCACCTGTCGGGC |
| | Chain | CTCCCAGGGCATCTCCAGCTGGCTGGCCTGGTATCAG |
| | | CAGAAGCCCGGCAAGGCCCCTAAGCTGCTGATCTACG |
| | | CCGCCTCCAGCCTGCAGTCCGGCGTGCCCTCCAGATT |
| | | CTCCGGCTCTGGCTCCGGCACCGACTTCACCCTGACC |
| | | ATCAGCTCCCTGCAGCCCGAGGACTTCGCCACCTACT |
| | | ACTGCCAGCAGGGCAACTCCTTCCCTCGGACCTTCGG |
| | | CGGAGGCACCAAAGTGGAAATCAAGCGTACGGTGGCC |
| | | GCTCCCTCCGTGTTCATCTTCCCACCCTCCGACGAGC |
| | | AGCTGAAGTCCGGCACCGCCTCCGTCGTGTGCCTGCT |
| | | GAACAACTTCTACCCTCGCGAGGCCAAAGTGCAGTGG |
| | | AAAGTGGACAACGCCCTGCAGTCCGGCAACTCCCAGG |
| | | AATCCGTCACCGAGCAGGACTCCAAGGACAGCACCTA |
| | | CTCCCTGTCCTCCACCCTGACCCTGTCCAAGGCCGAC |
| | | TACGAGAAGCACAAAGTGTACGCCTGCGAAGTGACCC |
| | | ACCAGGGCCTGTCCAGCCCCGTGACCAAGTCCTTCAA |
| | | CCGGGGCGAGTGC |
| 356 | | |
| SEQ ID NO: 384 | HCDR1 | GGSIEGRYWS |
| (Combined) | | |
| SEQ ID NO: 385 | HCDR2 | YIYGSGSTKYNPSLKS |
| (Combined) | | |
| SEQ ID NO: 362 | HCDR3 | ESQESPYNNWFDP |
| (Combined) | | |
| SEQ ID NO: 363 (Kabat) | HCDR1 | GRYWS |
| SEQ ID NO: 385 (Kabat) | HCDR2 | YIYGSGSTKYNPSLKS |
| SEQ ID NO: 362 (Kabat) | HCDR3 | ESQESPYNNWFDP |
| SEQ ID NO: 386 (Chothia) | HCDR1 | GGSIEGR |
| SEQ ID NO: 387 (Chothia) | HCDR2 | YGSGS |
| SEQ ID NO: 362 (Chothia) | HCDR3 | ESQESPYNNWFDP |
| SEQ ID NO: 388 (IMGT) | HCDR1 | GGSIEGRY |
| SEQ ID NO: 389 (IMGT) | HCDR2 | IYGSGST |
| SEQ ID NO: 368 (IMGT) | HCDR3 | ARESQESPYNNWFDP |
| SEQ ID NO: 538 | HCDR1 | GSIEGRYWS |
| (Alternative) | | |
| SEQ ID NO: 385 | HCDR2 | YIYGSGSTKYNPSLKS |
| (Alternative) | | |
| SEQ ID NO: 368 | HCDR3 | ARESQESPYNNWFDP |
| (Alternative) | | |
| SEQ ID NO: 390 | VH | QVQLQESGPGLVKPSETLSLTCTVSGGSIEGRYWSWI |
| | | RQPPGKGLEWIGYIYGSGSTKYNPSLKSRVTISVDTS |
| | | KNQFSLKLSSVTAADTAVYYCARESQESPYNNWFDPW |
| | | GQGTLVTVSS |
| SEQ ID NO: 391 | DNA VH | CAAGTGCAGCTGCAGGAATCTGGCCCTGGCCTGGTCA |
| | | AGCCCTCCGAGACACTGTCCCTGACCTGCACCGTGTC |
| | | CGGCGGCTCTATCGAGGGCCGGTACTGGTCCTGGATC |
| | | CGGCAGCCTCCTGGCAAGGGCCTGGAATGGATCGGCT |
| | | ACATCTACGGCTCCGGCTCCACCAAGTACAACCCCAG |
| | | CCTGAAGTCCAGAGTGACCATCTCCGTGGACACCTCC |
| | | AAGAACCAGTTCTCCCTGAAGCTGTCCTCCGTGACCG |
| | | CCGCTGACACCGCCGTGTACTACTGCGCCAGAGAGTC |
| | | CCAGGAATCCCCTTACAACAATTGGTTCGACCCCTGG |
| | | GGCCAGGGCACCCTGGTCACCGTGTCCTCT |
| SEQ ID NO: 392 | 356.A | QVQLQESGPGLVKPSETLSLTCTVSGGSIEGRYWSWI |
| | Heavy | RQPPGKGLEWIGYIYGSGSTKYNPSLKSRVTISVDTS |
| | Chain | KNQFSLKLSSVTAADTAVYYCARESQESPYNNWFDPW |
| | | GQGTLVTVSSASTKGPSVFPLAPCSRSTSESTAALGC |
| | | LVKDYFPEPVTVSWNSGALTSGVHTFPAVLQSSGLYS |
| | | LSSVVTVPSSSLGTKTYTCNVDHKPSNTKVDKRVESK |
| | | YGPPCPPCPAPEFLGGPSVFLFPPKPKDTLMISRTPE |
| | | VTCVVVDVSQEDPEVQFNWYVDGVEVHNAKTKPREEQ |
| | | FNSTYRVVSVLTVLHQDWLNGKEYKCKVSNKGLPSSI |
| | | EKTISKAKGQPREPQVYTLPPSQEEMTKNQVSLTCLV |
| | | KGFYPSDIAVEWESNGQPENNYKTTPPVLDSDGSFFL |
| | | YSRLTVDKSRWQEGNVFSCSVMHEALHNHYTQKSLSL |
| | | SLGX, wherein X is K or absent |
| SEQ ID NO: 393 | 356.A | CAAGTGCAGCTGCAGGAATCTGGCCCTGGCCTGGTCA |
| | DNA | AGCCCTCCGAGACACTGTCCCTGACCTGCACCGTGTC |
| | Heavy | CGGCGGCTCTATCGAGGGCCGGTACTGGTCCTGGATC |
| | Chain | CGGCAGCCTCCTGGCAAGGGCCTGGAATGGATCGGCT |
| | | ACATCTACGGCTCCGGCTCCACCAAGTACAACCCCAG |
| | | CCTGAAGTCCAGAGTGACCATCTCCGTGGACACCTCC |
| | | AAGAACCAGTTCTCCCTGAAGCTGTCCTCCGTGACCG |
| | | CCGCTGACACCGCCGTGTACTACTGCGCCAGAGAGTC |
| | | CCAGGAATCCCCTTACAACAATTGGTTCGACCCCTGG |
| | | GGCCAGGGCACCCTGGTCACCGTGTCCTCTGCCTCCA |
| | | CCAAGGGCCCCTCCGTGTTCCCTCTGGCCCCTTGCTC |
| | | CCGGTCCACCTCCGAGTCTACCGCCGCTCTGGGCTGC |
| | | CTCGTGAAGGACTACTTCCCCGAGCCCGTGACCGTGT |
| | | CCTGGAACTCTGGCGCCCTGACCTCCGGCGTGCACAC |
| | | CTTCCCTGCCGTGCTGCAGTCCTCCGGCCTGTACTCC |
| | | CTGTCCAGCGTCGTGACCGTGCCCTCCTCCAGCCTGG |
| | | GCACCAAGACCTACACCTGTAACGTGGACCACAAGCC |
| | | CTCCAACACCAAAGTGGACAAGCGGGTGGAATCTAAG |
| | | TACGGCCCTCCCTGCCCTCCTTGCCCTGCCCCTGAGT |
| | | TCCTGGGCGGACCTTCCGTGTTCCTGTTCCCTCCAAA |
| | | GCCCAAGGACACCCTGATGATCTCCCGGACCCCTGAA |
| | | GTGACCTGCGTGGTGGTGGACGTGTCCCAGGAAGATC |
| | | CCGAAGTCCAGTTCAATTGGTACGTGGACGGCGTGGA |
| | | AGTGCACAACGCCAAGACCAAGCCCAGAGAGGAACAG |
| | | TTCAACTCCACCTACCGGGTGGTGTCCGTGCTGACCG |
| | | TGCTGCACCAGGACTGGCTGAACGGCAAAGAGTACAA |
| | | GTGCAAAGTGTCCAACAAGGGCCTGCCCTCCAGCATC |
| | | GAAAAGACCATCTCCAAGGCCAAGGGCCAGCCCCGCG |
| | | AGCCCCAAGTGTACACCCTGCCTCCCAGCCAGGAAGA |
| | | GATGACCAAGAATCAAGTGTCCCTGACTTGTCTGGTC |
| | | AAGGGCTTCTACCCCTCCGATATCGCCGTGGAGTGGG |
| | | AGTCCAACGGCCAGCCCGAGAACAACTACAAGACCAC |
| | | CCCTCCCGTGCTGGACTCCGACGGCTCCTTCTTCCTG |
| | | TACTCTCGGCTGACCGTGGACAAGTCCCGGTGGCAGG |
| | | AAGGCAACGTCTTCTCCTGCTCCGTGATGCACGAGGC |
| | | CCTGCACAACCACTACACCCAGAAGTCCCTGTCCCTG |
| | | TCTCTGGGCX₁X₂X₃, wherein X₁ is A, X₂ |
| | | is A, and X₃ is G; or X₁ is absent, |
| | | X₂ is absent, and X₃ is absent. |
| SEQ ID NO: 472 | 356.B | QVQLQESGPGLVKPSETLSLTCTVSGGSIEGRYWSWI |
| | Heavy | RQPPGKGLEWIGYIYGSGSTKYNPSLKSRVTISVDTS |
| | chain | KNQFSLKLSSVTAADTAVYYCARESQESPYNNWFDPW |
| | | GQGTLVTVSSASTKGPSVFPLAPCSRSTSESTAALGC |
| | | LVKDYFPEPVTVSWNSGALTSGVHTFPAVLQSSGLYS |
| | | LSSVVTVPSSSLGTKTYTCNVDHKPSNTKVDKRVESK |
| | | YGPPCPPCPAPEFEGGPSVFLFPPKPKDTLMISRTPE |
| | | VTCVVVDVSQEDPEVQFNWYVDGVEVHNAKTKPREEQ |
| | | FNSTYRVVSVLTVLHQDWLNGKEYKCKVSNKGLPSSI |
| | | EKTISKAKGQPREPQVYTLPPSQEEMTKNQVSLTCLV |
| | | KGFYPSDIAVEWESNGQPENNYKTTPPVLDSDGSFFL |
| | | YSRLTVDKSRWQEGNVFSCSVMHEALHNHYTQKSLSL |
| | | SLGX, wherein X is K or absent |
| SEQ ID NO: 373 | LCDR1 | RASQGISSWLA |
| (Combined) | | |
| SEQ ID NO: 374 | LCDR2 | AASSLQS |
| (Combined) | | |
| SEQ ID NO: 375 | LCDR3 | QQGNSFPRT |
| (Combined) | | |
| SEQ ID NO: 373 (Kabat) | LCDR1 | RASQGISSWLA |
| SEQ ID NO: 374 (Kabat) | LCDR2 | AASSLQS |
| SEQ ID NO: 375 (Kabat) | LCDR3 | QQGNSFPRT |
| SEQ ID NO: 376 (Chothia) | LCDR1 | SQGISSW |
| SEQ ID NO: 377 (Chothia) | LCDR2 | AAS |
| SEQ ID NO: 378 (Chothia) | LCDR3 | GNSFPR |
| SEQ ID NO: 379 (IMGT) | LCDR1 | QGISSW |
| SEQ ID NO: 377 (IMGT) | LCDR2 | AAS |
| SEQ ID NO: 375 (IMGT) | LCDR3 | QQGNSFPRT |
| SEQ ID NO: 373 | LCDR1 | RASQGISSWLA |
| (Alternative) | | |
| SEQ ID NO: 374 | LCDR2 | AASSLQS |
| (Alternative) | | |
| SEQ ID NO: 375 | LCDR3 | QQGNSFPRT |
| (Alternative) | | |
| SEQ ID NO: 380 | VL | DIQMTQSPSSVSASVGDRVTITCRASQGISSWLAWYQ |
| | | QKPGKAPKLLIYAASSLQSGVPSRFSGSGSGTDFTLT |
| | | ISSLQPEDFATYYCQQGNSFPRTFGGGTKVEIK |
| SEQ ID NO: 381 | DNA VL | GACATCCAGATGACCCAGAGCCCCTCCTCCGTGTCCG |
| | | CCTCCGTGGGCGACAGAGTGACCATCACCTGTCGGGC |
| | | CTCCCAGGGCATCTCCAGCTGGCTGGCCTGGTATCAG |
| | | CAGAAGCCCGGCAAGGCCCCTAAGCTGCTGATCTACG |
| | | CCGCCTCCAGCCTGCAGTCCGGCGTGCCCTCCAGATT |
| | | CTCCGGCTCTGGCTCCGGCACCGACTTCACCCTGACC |
| | | ATCAGCTCCCTGCAGCCCGAGGACTTCGCCACCTACT |
| | | ACTGCCAGCAGGGCAACTCCTTCCCTCGGACCTTCGG |
| | | CGGAGGCACCAAAGTGGAAATCAAG |
| SEQ ID NO: 382 | Light | DIQMTQSPSSVSASVGDRVTITCRASQGISSWLAWYQ |
| | Chain | QKPGKAPKLLIYAASSLQSGVPSRFSGSGSGTDFTLT |
| | | ISSLQPEDFATYYCQQGNSFPRTFGGGTKVEIKRTVA |
| | | APSVFIFPPSDEQLKSGTASVVCLLNNFYPREAKVQW |
| | | KVDNALQSGNSQESVTEQDSKDSTYSLSSTLTLSKAD |
| | | YEKHKVYACEVTHQGLSSPVTKSFNRGEC |
| SEQ ID NO: 383 | DNA | GACATCCAGATGACCCAGAGCCCCTCCTCCGTGTCCG |
| | Light | CCTCCGTGGGCGACAGAGTGACCATCACCTGTCGGGC |
| | Chain | CTCCCAGGGCATCTCCAGCTGGCTGGCCTGGTATCAG |
| | | CAGAAGCCCGGCAAGGCCCCTAAGCTGCTGATCTACG |
| | | CCGCCTCCAGCCTGCAGTCCGGCGTGCCCTCCAGATT |
| | | CTCCGGCTCTGGCTCCGGCACCGACTTCACCCTGACC |
| | | ATCAGCTCCCTGCAGCCCGAGGACTTCGCCACCTACT |
| | | ACTGCCAGCAGGGCAACTCCTTCCCTCGGACCTTCGG |
| | | CGGAGGCACCAAAGTGGAAATCAAGCGTACGGTGGCC |
| | | GCTCCCTCCGTGTTCATCTTCCCACCCTCCGACGAGC |
| | | AGCTGAAGTCCGGCACCGCCTCCGTCGTGTGCCTGCT |
| | | GAACAACTTCTACCCTCGCGAGGCCAAAGTGCAGTGG |
| | | AAAGTGGACAACGCCCTGCAGTCCGGCAACTCCCAGG |
| | | AATCCGTCACCGAGCAGGACTCCAAGGACAGCACCTA |
| | | CTCCCTGTCCTCCACCCTGACCCTGTCCAAGGCCGAC |
| | | TACGAGAAGCACAAAGTGTACGCCTGCGAAGTGACCC |
| | | ACCAGGGCCTGTCCAGCCCCGTGACCAAGTCCTTCAA |
| | | CCGGGGCGAGTGC |
| 373 | | |
| SEQ ID NO: 394 | HCDR1 | GFTFHRYAMS |
| (Combined) | | |
| SEQ ID NO: 395 | HCDR2 | AISGSGMNTYYADSVKG |
| (Combined) | | |
| SEQ ID NO: 396 | HCDR3 | GGLYGSGSYLSDFDL |
| (Combined) | | |
| SEQ ID NO: 397 (Kabat) | HCDR1 | RYAMS |
| SEQ ID NO: 395 (Kabat) | HCDR2 | AISGSGMNTYYADSVKG |
| SEQ ID NO: 396 (Kabat) | HCDR3 | GGLYGSGSYLSDFDL |
| SEQ ID NO: 398 (Chothia) | HCDR1 | GFTFHRY |
| SEQ ID NO: 399 (Chothia) | HCDR2 | SGSGMN |
| SEQ ID NO: 396 (Chothia) | HCDR3 | GGLYGSGSYLSDFDL |
| SEQ ID NO: 400 (IMGT) | HCDR1 | GFTFHRYA |
| SEQ ID NO: 401 (IMGT) | HCDR2 | ISGSGMNT |
| SEQ ID NO: 402 (IMGT) | HCDR3 | ARGGLYGSGSYLSDFDL |
| SEQ ID NO: 530 | HCDR1 | FTFHRYAMS |
| (Alternative) | | |
| SEQ ID NO: 395 | HCDR2 | AISGSGMNTYYADSVKG |
| (Alternative) | | |
| SEQ ID NO: 402 | HCDR3 | ARGGLYGSGSYLSDFDL |
| (Alternative) | | |
| SEQ ID NO: 403 | VH | EVQLLESGGGLVQPGGSLRLSCAASGFTFHRYAMSWV |
| | | RQAPGKGLEWVSAISGSGMNTYYADSVKGRFTISRDN |
| | | SKNTLYLQMNSLRAEDTAVYYCARGGLYGSGSYLSDF |
| | | DLWGRGTLVTVSS |
| SEQ ID NO: 404 | DNA VH | GAAGTGCAGCTGCTGGAATCTGGCGGCGGACTGGTGC |
| | | AGCCTGGCGGCTCCCTGAGACTGTCTTGCGCCGCCTC |
| | | CGGCTTCACCTTCCACAGATACGCCATGTCCTGGGTC |
| | | CGACAGGCCCCTGGCAAGGGCCTGGAGTGGGTGTCCG |
| | | CCATCTCCGGCTCCGGCATGAACACCTACTACGCCGA |
| | | CTCCGTGAAGGGCCGGTTCACCATCTCCCGGGACAAC |
| | | TCCAAGAACACCCTGTACCTGCAGATGAACTCCCTGC |
| | | GGGCCGAGGACACCGCCGTGTACTACTGTGCCAGAGG |
| | | CGGCCTGTACGGCTCCGGCTCCTACCTGTCCGACTTC |
| | | GACCTGTGGGGCAGAGGCACCCTGGTCACCGTGTCCT |
| | | CC |
| SEQ ID NO: 405 | 373.A | EVQLLESGGGLVQPGGSLRLSCAASGFTFHRYAMSWV |
| | Heavy | RQAPGKGLEWVSAISGSGMNTYYADSVKGRFTISRDN |
| | Chain | SKNTLYLQMNSLRAEDTAVYYCARGGLYGSGSYLSDF |
| | | DLWGRGTLVTVSSASTKGPSVFPLAPCSRSTSESTAA |
| | | LGCLVKDYFPEPVTVSWNSGALTSGVHTFPAVLQSSG |
| | | LYSLSSVVTVPSSSLGTKTYTCNVDHKPSNTKVDKRV |
| | | ESKYGPPCPPCPAPEFLGGPSVFLFPPKPKDTLMISR |
| | | TPEVTCVVVDVSQEDPEVQFNWYVDGVEVHNAKTKPR |
| | | EEQFNSTYRVVSVLTVLHQDWLNGKEYKCKVSNKGLP |
| | | SSIEKTISKAKGQPREPQVYTLPPSQEEMTKNQVSLT |
| | | CLVKGFYPSDIAVEWESNGQPENNYKTTPPVLDSDGS |
| | | FFLYSRLTVDKSRWQEGNVFSCSVMHEALHNHYTQKS |
| | | LSLSLGX, wherein X is K or absent |
| SEQ ID NO: 406 | 373.A | GAAGTGCAGCTGCTGGAATCTGGCGGCGGACTGGTGC |
| | DNA | AGCCTGGCGGCTCCCTGAGACTGTCTTGCGCCGCCTC |
| | Heavy | CGGCTTCACCTTCCACAGATACGCCATGTCCTGGGTC |
| | Chain | CGACAGGCCCCTGGCAAGGGCCTGGAGTGGGTGTCCG |
| | | CCATCTCCGGCTCCGGCATGAACACCTACTACGCCGA |
| | | CTCCGTGAAGGGCCGGTTCACCATCTCCCGGGACAAC |
| | | TCCAAGAACACCCTGTACCTGCAGATGAACTCCCTGC |
| | | GGGCCGAGGACACCGCCGTGTACTACTGTGCCAGAGG |
| | | CGGCCTGTACGGCTCCGGCTCCTACCTGTCCGACTTC |
| | | GACCTGTGGGGCAGAGGCACCCTGGTCACCGTGTCCT |
| | | CCGCCTCCACAAAGGGCCCCTCCGTGTTCCCTCTGGC |
| | | CCCTTGCTCCCGGTCCACCTCCGAGTCTACCGCCGCT |
| | | CTGGGCTGCCTCGTGAAGGACTACTTCCCCGAGCCCG |
| | | TGACCGTGTCCTGGAACTCTGGCGCCCTGACCTCCGG |
| | | CGTGCACACCTTCCCTGCCGTGCTGCAGTCCTCCGGC |
| | | CTGTACTCCCTGTCCAGCGTCGTGACCGTGCCCTCCT |
| | | CCAGCCTGGGCACCAAGACCTACACCTGTAACGTGGA |
| | | CCACAAGCCCTCCAACACCAAAGTGGACAAGCGGGTG |
| | | GAATCTAAGTACGGCCCTCCCTGCCCTCCTTGCCCTG |
| | | CCCCTGAGTTCCTGGGCGGACCTTCCGTGTTCCTGTT |
| | | CCCTCCAAAGCCCAAGGACACCCTGATGATCTCCCGG |
| | | ACCCCTGAAGTGACCTGCGTGGTGGTGGACGTGTCCC |
| | | AGGAAGATCCCGAAGTCCAGTTCAATTGGTACGTGGA |
| | | CGGCGTGGAAGTGCACAACGCCAAGACCAAGCCCAGA |
| | | GAGGAACAGTTCAACTCCACCTACCGGGTGGTGTCCG |
| | | TGCTGACCGTGCTGCACCAGGACTGGCTGAACGGCAA |
| | | AGAGTACAAGTGCAAAGTGTCCAACAAGGGCCTGCCC |
| | | TCCAGCATCGAAAAGACCATCTCCAAGGCCAAGGGCC |
| | | AGCCCCGCGAGCCCCAAGTGTACACCCTGCCTCCCAG |
| | | CCAGGAAGAGATGACCAAGAATCAAGTGTCCCTGACT |
| | | TGTCTGGTCAAGGGCTTCTACCCCTCCGATATCGCCG |
| | | TGGAGTGGGAGTCCAACGGCCAGCCCGAGAACAACTA |
| | | CAAGACCACCCCTCCCGTGCTGGACTCCGACGGCTCC |
| | | TTCTTCCTGTACTCTCGGCTGACCGTGGACAAGTCCC |
| | | GGTGGCAGGAAGGCAACGTCTTCTCCTGCTCCGTGAT |
| | | GCACGAGGCCCTGCACAACCACTACACCCAGAAGTCC |
| | | CTGTCCCTGTCTCTGGGCX₁X₂X₃, wherein X₁ |
| | | is A, X₂ is A, and X₃ is G; or X₁ is |
| | | absent, X₂ is absent, and X₃ is |
| | | absent. |
| SEQ ID NO: 473 | 373.B | EVQLLESGGGLVQPGGSLRLSCAASGFTFHRYAMSWV |
| | Heavy | RQAPGKGLEWVSAISGSGMNTYYADSVKGRFTISRDN |
| | chain | SKNTLYLQMNSLRAEDTAVYYCARGGLYGSGSYLSDF |
| | | DLWGRGTLVTVSSASTKGPSVFPLAPCSRSTSESTAA |
| | | LGCLVKDYFPEPVTVSWNSGALTSGVHTFPAVLQSSG |
| | | LYSLSSVVTVPSSSLGTKTYTCNVDHKPSNTKVDKRV |
| | | ESKYGPPCPPCPAPEFEGGPSVFLFPPKPKDTLMISR |
| | | TPEVTCVVVDVSQEDPEVQFNWYVDGVEVHNAKTKPR |
| | | EEQFNSTYRVVSVLTVLHQDWLNGKEYKCKVSNKGLP |
| | | SSIEKTISKAKGQPREPQVYTLPPSQEEMTKNQVSLT |
| | | CLVKGFYPSDIAVEWESNGQPENNYKTTPPVLDSDGS |
| | | FFLYSRLTVDKSRWQEGNVFSCSVMHEALHNHYTQKS |
| | | LSLSLGX, wherein X is K or absent |
| SEQ ID NO: 407 | LCDR1 | RASQSVGSNLA |
| (Combined) | | |
| SEQ ID NO: 408 | LCDR2 | GASTRAT |
| (Combined) | | |
| SEQ ID NO: 409 | LCDR3 | QQHNAFPYT |
| (Combined) | | |
| SEQ ID NO: 407 (Kabat) | LCDR1 | RASQSVGSNLA |
| SEQ ID NO: 408 (Kabat) | LCDR2 | GASTRAT |
| SEQ ID NO: 409 (Kabat) | LCDR3 | QQHNAFPYT |
| SEQ ID NO: 410 (Chothia) | LCDR1 | SQSVGSN |
| SEQ ID NO: 411 (Chothia) | LCDR2 | GAS |
| SEQ ID NO: 412 (Chothia) | LCDR3 | HNAFPY |
| SEQ ID NO: 413 (IMGT) | LCDR1 | QSVGSN |
| SEQ ID NO: 411 (IMGT) | LCDR2 | GAS |
| SEQ ID NO: 409 (IMGT) | LCDR3 | QQHNAFPYT |
| SEQ ID NO: 407 | LCDR1 | RASQSVGSNLA |
| (Alternative) | | |
| SEQ ID NO: 408 | LCDR2 | GASTRAT |
| (Alternative) | | |
| SEQ ID NO: 409 | LCDR3 | QQHNAFPYT |
| (Alternative) | | |
| SEQ ID NO: 414 | VL | EIVLTQSPATLSVSPGERATLSCRASQSVGSNLAWYQ |
| | | QKPGQAPRLLIYGASTRATGIPARFSGSGSGTEFTLT |
| | | ISSLQSEDFAVYYCQQHNAFPYTFGGGTKVEIK |
| SEQ ID NO: 415 | DNA VL | GAGATCGTGCTGACACAGTCCCCTGCCACCCTGTCTG |
| | | TGTCTCCCGGCGAGAGAGCCACCCTGAGCTGCAGAGC |
| | | CTCCCAGTCCGTGGGCTCCAACCTGGCCTGGTATCAG |
| | | CAGAAGCCCGGCCAGGCCCCTCGGCTGCTGATCTACG |
| | | GCGCCTCTACCAGAGCCACCGGCATCCCTGCCAGATT |
| | | CTCCGGCTCTGGCTCCGGCACCGAGTTCACCCTGACC |
| | | ATCTCCAGCCTGCAGTCCGAGGACTTCGCCGTGTACT |
| | | ACTGCCAGCAGCACAACGCCTTCCCTTACACCTTCGG |
| | | CGGAGGCACCAAAGTGGAAATCAAG |
| SEQ ID NO: 416 | Light | EIVLTQSPATLSVSPGERATLSCRASQSVGSNLAWYQ |
| | Chain | QKPGQAPRLLIYGASTRATGIPARFSGSGSGTEFTLT |
| | | ISSLQSEDFAVYYCQQHNAFPYTFGGGTKVEIKRTVA |
| | | APSVFIFPPSDEQLKSGTASVVCLLNNFYPREAKVQW |
| | | KVDNALQSGNSQESVTEQDSKDSTYSLSSTLTLSKAD |
| | | YEKHKVYACEVTHQGLSSPVTKSFNRGEC |
| SEQ ID NO: 417 | DNA | GAGATCGTGCTGACACAGTCCCCTGCCACCCTGTCTG |
| | Light | TGTCTCCCGGCGAGAGAGCCACCCTGAGCTGCAGAGC |
| | Chain | CTCCCAGTCCGTGGGCTCCAACCTGGCCTGGTATCAG |
| | | CAGAAGCCCGGCCAGGCCCCTCGGCTGCTGATCTACG |
| | | GCGCCTCTACCAGAGCCACCGGCATCCCTGCCAGATT |
| | | CTCCGGCTCTGGCTCCGGCACCGAGTTCACCCTGACC |
| | | ATCTCCAGCCTGCAGTCCGAGGACTTCGCCGTGTACT |
| | | ACTGCCAGCAGCACAACGCCTTCCCTTACACCTTCGG |
| | | CGGAGGCACCAAAGTGGAAATCAAGCGTACGGTGGCC |
| | | GCTCCCTCCGTGTTCATCTTCCCACCCTCCGACGAGC |
| | | AGCTGAAGTCCGGCACCGCCTCCGTCGTGTGCCTGCT |
| | | GAACAACTTCTACCCTCGCGAGGCCAAAGTGCAGTGG |
| | | AAAGTGGACAACGCCCTGCAGTCCGGCAACTCCCAGG |
| | | AATCCGTCACCGAGCAGGACTCCAAGGACAGCACCTA |
| | | CTCCCTGTCCTCCACCCTGACCCTGTCCAAGGCCGAC |
| | | TACGAGAAGCACAAAGTGTACGCCTGCGAAGTGACCC |
| | | ACCAGGGCCTGTCCAGCCCCGTGACCAAGTCCTTCAA |
| | | CCGGGGCGAGTGC |
| 350 | | |
| SEQ ID NO: 418 | HCDR1 | GGSIERYYWS |
| (Combined) | | |
| SEQ ID NO: 419 | HCDR2 | YIYGRGSTNYNPSLKS |
| (Combined) | | |
| SEQ ID NO: 362 | HCDR3 | ESQESPYNNWFDP |
| (Combined) | | |
| SEQ ID NO: 420 (Kabat) | HCDR1 | RYYWS |
| SEQ ID NO: 419 (Kabat) | HCDR2 | YIYGRGSTNYNPSLKS |
| SEQ ID NO: 362 (Kabat) | HCDR3 | ESQESPYNNWFDP |
| SEQ ID NO: 421 (Chothia) | HCDR1 | GGSIERY |
| SEQ ID NO: 422 (Chothia) | HCDR2 | YGRGS |
| SEQ ID NO: 362 (Chothia) | HCDR3 | ESQESPYNNWFDP |
| SEQ ID NO: 423 (IMGT) | HCDR1 | GGSIERYY |
| SEQ ID NO: 424 (IMGT) | HCDR2 | IYGRGST |
| SEQ ID NO: 368 (IMGT) | HCDR3 | ARESQESPYNNWFDP |
| SEQ ID NO: 537 | HCDR1 | GSIERYYWS |
| (Alternative) | | |
| SEQ ID NO: 419 | HCDR2 | YIYGRGSTNYNPSLKS |
| (Alternative) | | |
| SEQ ID NO: 368 | HCDR3 | ARESQESPYNNWFDP |
| (Alternative) | | |
| SEQ ID NO: 425 | VH | QVQLQESGPGLVKPSETLSLTCTVSGGSIERYYWSWI |
| | | RQPPGKGLEWIGYIYGRGSTNYNPSLKSRVTISVDTS |
| | | KNQFSLKLSSVTAADTAVYYCARESQESPYNNWFDPW |
| | | GQGTLVTVSS |
| SEQ ID NO: 426 | DNA VH | CAAGTGCAGCTGCAGGAATCTGGCCCTGGCCTGGTCA |
| | | AGCCCTCCGAGACACTGTCCCTGACCTGCACCGTGTC |
| | | CGGCGGCTCCATCGAGCGGTACTACTGGTCCTGGATC |
| | | CGGCAGCCTCCCGGCAAGGGCCTGGAATGGATCGGCT |
| | | ACATCTACGGCAGAGGCTCCACCAACTACAACCCCAG |
| | | CCTGAAGTCCAGAGTGACCATCTCCGTGGACACCTCC |
| | | AAGAACCAGTTCTCCCTGAAGCTGTCCTCCGTGACCG |
| | | CCGCTGACACCGCCGTGTACTACTGCGCCAGAGAGTC |
| | | CCAGGAATCCCCTTACAACAATTGGTTCGACCCCTGG |
| | | GGCCAGGGCACCCTGGTCACCGTGTCCTCT |
| SEQ ID NO: 427 | 350.A | QVQLQESGPGLVKPSETLSLTCTVSGGSIERYYWSWI |
| | Heavy | RQPPGKGLEWIGYIYGRGSTNYNPSLKSRVTISVDTS |
| | Chain | KNQFSLKLSSVTAADTAVYYCARESQESPYNNWFDPW |
| | | GQGTLVTVSSASTKGPSVFPLAPCSRSTSESTAALGC |
| | | LVKDYFPEPVTVSWNSGALTSGVHTFPAVLQSSGLYS |
| | | LSSVVTVPSSSLGTKTYTCNVDHKPSNTKVDKRVESK |
| | | YGPPCPPCPAPEFLGGPSVFLFPPKPKDTLMISRTPE |
| | | VTCVVVDVSQEDPEVQFNWYVDGVEVHNAKTKPREEQ |
| | | FNSTYRVVSVLTVLHQDWLNGKEYKCKVSNKGLPSSI |
| | | EKTISKAKGQPREPQVYTLPPSQEEMTKNQVSLTCLV |
| | | KGFYPSDIAVEWESNGQPENNYKTTPPVLDSDGSFFL |
| | | YSRLTVDKSRWQEGNVFSCSVMHEALHNHYTQKSLSL |
| | | SLGX wherein X is K or absent |
| SEQ ID NO: 428 | 350.A | CAAGTGCAGCTGCAGGAATCTGGCCCTGGCCTGGTCA |
| | DNA | AGCCCTCCGAGACACTGTCCCTGACCTGCACCGTGTC |
| | Heavy | CGGCGGCTCCATCGAGCGGTACTACTGGTCCTGGATC |
| | Chain | CGGCAGCCTCCCGGCAAGGGCCTGGAATGGATCGGCT |
| | | ACATCTACGGCAGAGGCTCCACCAACTACAACCCCAG |
| | | CCTGAAGTCCAGAGTGACCATCTCCGTGGACACCTCC |
| | | AAGAACCAGTTCTCCCTGAAGCTGTCCTCCGTGACCG |
| | | CCGCTGACACCGCCGTGTACTACTGCGCCAGAGAGTC |
| | | CCAGGAATCCCCTTACAACAATTGGTTCGACCCCTGG |
| | | GGCCAGGGCACCCTGGTCACCGTGTCCTCTGCCTCCA |
| | | CCAAGGGCCCCTCCGTGTTCCCTCTGGCCCCTTGCTC |
| | | CCGGTCCACCTCCGAGTCTACCGCCGCTCTGGGCTGC |
| | | CTCGTGAAGGACTACTTCCCCGAGCCCGTGACCGTGT |
| | | CCTGGAACTCTGGCGCCCTGACCTCCGGCGTGCACAC |
| | | CTTCCCTGCCGTGCTGCAGTCCTCCGGCCTGTACTCC |
| | | CTGTCCAGCGTCGTGACCGTGCCCTCCTCCAGCCTGG |
| | | GCACCAAGACCTACACCTGTAACGTGGACCACAAGCC |
| | | CTCCAACACCAAAGTGGACAAGCGGGTGGAATCTAAG |
| | | TACGGCCCTCCCTGCCCTCCTTGCCCTGCCCCTGAGT |
| | | TCCTGGGCGGACCTTCCGTGTTCCTGTTCCCTCCAAA |
| | | GCCCAAGGACACCCTGATGATCTCCCGGACCCCTGAA |
| | | GTGACCTGCGTGGTGGTGGACGTGTCCCAGGAAGATC |
| | | CCGAAGTCCAGTTCAATTGGTACGTGGACGGCGTGGA |
| | | AGTGCACAACGCCAAGACCAAGCCCAGAGAGGAACAG |
| | | TTCAACTCCACCTACCGGGTGGTGTCCGTGCTGACCG |
| | | TGCTGCACCAGGACTGGCTGAACGGCAAAGAGTACAA |
| | | GTGCAAAGTGTCCAACAAGGGCCTGCCCTCCAGCATC |
| | | GAAAAGACCATCTCCAAGGCCAAGGGCCAGCCCCGCG |
| | | AGCCCCAAGTGTACACCCTGCCTCCCAGCCAGGAAGA |
| | | GATGACCAAGAATCAAGTGTCCCTGACTTGTCTGGTC |
| | | AAGGGCTTCTACCCCTCCGATATCGCCGTGGAGTGGG |
| | | AGTCCAACGGCCAGCCCGAGAACAACTACAAGACCAC |
| | | CCCTCCCGTGCTGGACTCCGACGGCTCCTTCTTCCTG |
| | | TACTCTCGGCTGACCGTGGACAAGTCCCGGTGGCAGG |
| | | AAGGCAACGTCTTCTCCTGCTCCGTGATGCACGAGGC |
| | | CCTGCACAACCACTACACCCAGAAGTCCCTGTCCCTG |
| | | TCTCTGGGCX₁X₂X₃, wherein X₁ is A, X₂ |
| | | is A, and X₃ is G; or X₁ is absent, |
| | | X₂ is absent, and X₃ is absent. |
| SEQ ID NO: 474 | 350.B | QVQLQESGPGLVKPSETLSLTCTVSGGSIERYYWSWI |
| | Heavy | RQPPGKGLEWIGYIYGRGSTNYNPSLKSRVTISVDTS |
| | chain | KNQFSLKLSSVTAADTAVYYCARESQESPYNNWFDPW |
| | | GQGTLVTVSSASTKGPSVFPLAPCSRSTSESTAALGC |
| | | LVKDYFPEPVTVSWNSGALTSGVHTFPAVLQSSGLYS |
| | | LSSVVTVPSSSLGTKTYTCNVDHKPSNTKVDKRVESK |
| | | YGPPCPPCPAPEFEGGPSVFLFPPKPKDTLMISRTPE |
| | | VTCVVVDVSQEDPEVQFNWYVDGVEVHNAKTKPREEQ |
| | | FNSTYRVVSVLTVLHQDWLNGKEYKCKVSNKGLPSSI |
| | | EKTISKAKGQPREPQVYTLPPSQEEMTKNQVSLTCLV |
| | | KGFYPSDIAVEWESNGQPENNYKTTPPVLDSDGSFFL |
| | | YSRLTVDKSRWQEGNVFSCSVMHEALHNHYTQKSLSL |
| | | SLGX, wherein X is K or absent |
| SEQ ID NO: 550 | 350 Fab | QVQLQESGPGLVKPSETLSLTCTVSGGSIERYYWSWI |
| | heavy | RQPPGKGLEWIGYIYGRGSTNYNPSLKSRVTISVDTS |
| | chain | KNQFSLKLSSVTAADTAVYYCARESQESPYNNWFDPW |
| | | GQGTLVTVSSASTKGPSVFPLAPCSRSTSESTAALGC |
| | | LVKDYFPEPVTVSWNSGALTSGVHTFPAVLQSSGLYS |
| | | LSSVVTVPSSSLGTKTYTCNVDHKPSNTKVDKRVESK |
| | | YGP |
| SEQ ID NO: 373 | LCDR1 | RASQGISSWLA |
| (Combined) | | |
| SEQ ID NO: 374 | LCDR2 | AASSLQS |
| (Combined) | | |
| SEQ ID NO: 375 | LCDR3 | QQGNSFPRT |
| (Combined) | | |
| SEQ ID NO: 373 (Kabat) | LCDR1 | RASQGISSWLA |
| SEQ ID NO: 374 (Kabat) | LCDR2 | AASSLQS |
| SEQ ID NO: 375 (Kabat) | LCDR3 | QQGNSFPRT |
| SEQ ID NO: 376 (Chothia) | LCDR1 | SQGISSW |
| SEQ ID NO: 377 (Chothia) | LCDR2 | AAS |
| SEQ ID NO: 378 (Chothia) | LCDR3 | GNSFPR |
| SEQ ID NO: 379 (IMGT) | LCDR1 | QGISSW |
| SEQ ID NO: 377 (IMGT) | LCDR2 | AAS |
| SEQ ID NO: 375 (IMGT) | LCDR3 | QQGNSFPRT |
| SEQ ID NO: 373 | LCDR1 | RASQGISSWLA |
| (Alternative) | | |
| SEQ ID NO: 374 | LCDR2 | AASSLQS |
| (Alternative) | | |
| SEQ ID NO: 375 | LCDR3 | QQGNSFPRT |
| (Alternative) | | |
| SEQ ID NO: 380 | VL | DIQMTQSPSSVSASVGDRVTITCRASQGISSWLAWYQ |
| | | QKPGKAPKLLIYAASSLQSGVPSRFSGSGSGTDFTLT |
| | | ISSLQPEDFATYYCQQGNSFPRTFGGGTKVEIK |
| SEQ ID NO: 381 | DNA VL | GACATCCAGATGACCCAGAGCCCCTCCTCCGTGTCCG |
| | | CCTCCGTGGGCGACAGAGTGACCATCACCTGTCGGGC |
| | | CTCCCAGGGCATCTCCAGCTGGCTGGCCTGGTATCAG |
| | | CAGAAGCCCGGCAAGGCCCCTAAGCTGCTGATCTACG |
| | | CCGCCTCCAGCCTGCAGTCCGGCGTGCCCTCCAGATT |
| | | CTCCGGCTCTGGCTCCGGCACCGACTTCACCCTGACC |
| | | ATCAGCTCCCTGCAGCCCGAGGACTTCGCCACCTACT |
| | | ACTGCCAGCAGGGCAACTCCTTCCCTCGGACCTTCGG |
| | | CGGAGGCACCAAAGTGGAAATCAAG |
| SEQ ID NO: 382 | Light | DIQMTQSPSSVSASVGDRVTITCRASQGISSWLAWYQ |
| | Chain | QKPGKAPKLLIYAASSLQSGVPSRFSGSGSGTDFTLT |
| | | ISSLQPEDFATYYCQQGNSFPRTFGGGTKVEIKRTVA |
| | | APSVFIFPPSDEQLKSGTASVVCLLNNFYPREAKVQW |
| | | KVDNALQSGNSQESVTEQDSKDSTYSLSSTLTLSKAD |
| | | YEKHKVYACEVTHQGLSSPVTKSFNRGEC |
| SEQ ID NO: 383 | | GACATCCAGATGACCCAGAGCCCCTCCTCCGTGTCCG |
| | DNA | CCTCCGTGGGCGACAGAGTGACCATCACCTGTCGGGC |
| | Light | CTCCCAGGGCATCTCCAGCTGGCTGGCCTGGTATCAG |
| | Chain | CAGAAGCCCGGCAAGGCCCCTAAGCTGCTGATCTACG |
| | | CCGCCTCCAGCCTGCAGTCCGGCGTGCCCTCCAGATT |
| | | CTCCGGCTCTGGCTCCGGCACCGACTTCACCCTGACC |
| | | ATCAGCTCCCTGCAGCCCGAGGACTTCGCCACCTACT |
| | | ACTGCCAGCAGGGCAACTCCTTCCCTCGGACCTTCGG |
| | | CGGAGGCACCAAAGTGGAAATCAAGCGTACGGTGGCC |
| | | GCTCCCTCCGTGTTCATCTTCCCACCCTCCGACGAGC |
| | | AGCTGAAGTCCGGCACCGCCTCCGTCGTGTGCCTGCT |
| | | GAACAACTTCTACCCTCGCGAGGCCAAAGTGCAGTGG |
| | | AAAGTGGACAACGCCCTGCAGTCCGGCAACTCCCAGG |
| | | AATCCGTCACCGAGCAGGACTCCAAGGACAGCACCTA |
| | | CTCCCTGTCCTCCACCCTGACCCTGTCCAAGGCCGAC |
| | | TACGAGAAGCACAAAGTGTACGCCTGCGAAGTGACCC |
| | | ACCAGGGCCTGTCCAGCCCCGTGACCAAGTCCTTCAA |
| | | CCGGGGCGAGTGC |
| 374 | | |
| SEQ ID NO: 429 | HCDR1 | GFTFSYNAMS |
| (Combined) | | |
| SEQ ID NO: 430 | HCDR2 | SISGTGGSTYYADSVKG |
| (Combined) | | |
| SEQ ID NO: 396 | HCDR3 | GGLYGSGSYLSDFDL |
| (Combined) | | |
| SEQ ID NO: 431 (Kabat) | HCDR1 | YNAMS |
| SEQ ID NO: 430 (Kabat) | HCDR2 | SISGTGGSTYYADSVKG |
| SEQ ID NO: 396 (Kabat) | HCDR3 | GGLYGSGSYLSDFDL |
| SEQ ID NO: 432 (Chothia) | HCDR1 | GFTFSYN |
| SEQ ID NO: 433 (Chothia) | HCDR2 | SGTGGS |
| SEQ ID NO: 396 (Chothia) | HCDR3 | GGLYGSGSYLSDFDL |
| SEQ ID NO: 434 (IMGT) | HCDR1 | GFTFSYNA |
| SEQ ID NO: 435 (IMGT) | HCDR2 | ISGTGGST |
| SEQ ID NO: 402 (IMGT) | HCDR3 | ARGGLYGSGSYLSDFDL |
| SEQ ID NO: 531 | HCDR1 | FTFSYNAMS |
| (Alternative) | | |
| SEQ ID NO: 430 | HCDR2 | SISGTGGSTYYADSVKG |
| (Alternative) | | |
| SEQ ID NO: 402 | HCDR3 | ARGGLYGSGSYLSDFDL |
| (Alternative) | | |
| SEQ ID NO: 436 | VH | EVQLLESGGGLVQPGGSLRLSCAASGFTFSYNAMSWV |
| | | RQAPGKGLEWVSSISGTGGSTYYADSVKGRFTISRDN |
| | | SKNTLYLQMNSLRAEDTAVYYCARGGLYGSGSYLSDF |
| | | DLWGRGTLVTVSS |
| SEQ ID NO: 437 | DNA VH | GAAGTGCAGCTGCTGGAATCTGGCGGCGGACTGGTGC |
| | | AGCCTGGCGGCTCCCTGAGACTGTCTTGCGCCGCCTC |
| | | CGGCTTCACCTTCTCCTACAACGCCATGTCCTGGGTC |
| | | CGACAGGCCCCTGGCAAGGGCCTGGAGTGGGTGTCCT |
| | | CCATCTCCGGCACCGGCGGCTCCACCTACTACGCCGA |
| | | CTCTGTGAAGGGCCGGTTCACCATCTCCCGGGACAAC |
| | | TCCAAGAACACCCTGTACCTGCAGATGAACTCCCTGC |
| | | GGGCCGAGGACACCGCCGTGTACTACTGTGCCAGAGG |
| | | CGGCCTGTACGGCTCCGGCTCCTACCTGTCCGACTTC |
| | | GACCTGTGGGGCAGAGGCACCCTGGTCACCGTGTCCT |
| | | CC |
| SEQ ID NO: 438 | | EVQLLESGGGLVQPGGSLRLSCAASGFTFSYNAMSWV |
| | 374.A | RQAPGKGLEWVSSISGTGGSTYYADSVKGRFTISRDN |
| | Heavy | SKNTLYLQMNSLRAEDTAVYYCARGGLYGSGSYLSDF |
| | Chain | DLWGRGTLVTVSSASTKGPSVFPLAPCSRSTSESTAA |
| | | LGCLVKDYFPEPVTVSWNSGALTSGVHTFPAVLQSSG |
| | | LYSLSSVVTVPSSSLGTKTYTCNVDHKPSNTKVDKRV |
| | | ESKYGPPCPPCPAPEFLGGPSVFLFPPKPKDTLMISR |
| | | TPEVTCVVVDVSQEDPEVQFNWYVDGVEVHNAKTKPR |
| | | EEQFNSTYRVVSVLTVLHQDWLNGKEYKCKVSNKGLP |
| | | SSIEKTISKAKGQPREPQVYTLPPSQEEMTKNQVSLT |
| | | CLVKGFYPSDIAVEWESNGQPENNYKTTPPVLDSDGS |
| | | FFLYSRLTVDKSRWQEGNVFSCSVMHEALHNHYTQKS |
| | | LSLSLGX, wherein X is K or absent |
| SEQ ID NO: 439 | 374.A | GAAGTGCAGCTGCTGGAATCTGGCGGCGGACTGGTGC |
| | DNA | AGCCTGGCGGCTCCCTGAGACTGTCTTGCGCCGCCTC |
| | Heavy | CGGCTTCACCTTCTCCTACAACGCCATGTCCTGGGTC |
| | Chain | CGACAGGCCCCTGGCAAGGGCCTGGAGTGGGTGTCCT |
| | | CCATCTCCGGCACCGGCGGCTCCACCTACTACGCCGA |
| | | CTCTGTGAAGGGCCGGTTCACCATCTCCCGGGACAAC |
| | | TCCAAGAACACCCTGTACCTGCAGATGAACTCCCTGC |
| | | GGGCCGAGGACACCGCCGTGTACTACTGTGCCAGAGG |
| | | CGGCCTGTACGGCTCCGGCTCCTACCTGTCCGACTTC |
| | | GACCTGTGGGGCAGAGGCACCCTGGTCACCGTGTCCT |
| | | CCGCCTCCACAAAGGGCCCCTCCGTGTTCCCTCTGGC |
| | | CCCTTGCTCCCGGTCCACCTCCGAGTCTACCGCCGCT |
| | | CTGGGCTGCCTCGTGAAGGACTACTTCCCCGAGCCCG |
| | | TGACCGTGTCCTGGAACTCTGGCGCCCTGACCTCCGG |
| | | CGTGCACACCTTCCCTGCCGTGCTGCAGTCCTCCGGC |
| | | CTGTACTCCCTGTCCAGCGTCGTGACCGTGCCCTCCT |
| | | CCAGCCTGGGCACCAAGACCTACACCTGTAACGTGGA |
| | | CCACAAGCCCTCCAACACCAAAGTGGACAAGCGGGTG |
| | | GAATCTAAGTACGGCCCTCCCTGCCCTCCTTGCCCTG |
| | | CCCCTGAGTTCCTGGGCGGACCTTCCGTGTTCCTGTT |
| | | CCCTCCAAAGCCCAAGGACACCCTGATGATCTCCCGG |
| | | ACCCCTGAAGTGACCTGCGTGGTGGTGGACGTGTCCC |
| | | AGGAAGATCCCGAAGTCCAGTTCAATTGGTACGTGGA |
| | | CGGCGTGGAAGTGCACAACGCCAAGACCAAGCCCAGA |
| | | GAGGAACAGTTCAACTCCACCTACCGGGTGGTGTCCG |
| | | TGCTGACCGTGCTGCACCAGGACTGGCTGAACGGCAA |
| | | AGAGTACAAGTGCAAAGTGTCCAACAAGGGCCTGCCC |
| | | TCCAGCATCGAAAAGACCATCTCCAAGGCCAAGGGCC |
| | | AGCCCCGCGAGCCCCAAGTGTACACCCTGCCTCCCAG |
| | | CCAGGAAGAGATGACCAAGAATCAAGTGTCCCTGACT |
| | | TGTCTGGTCAAGGGCTTCTACCCCTCCGATATCGCCG |
| | | TGGAGTGGGAGTCCAACGGCCAGCCCGAGAACAACTA |
| | | CAAGACCACCCCTCCCGTGCTGGACTCCGACGGCTCC |
| | | TTCTTCCTGTACTCTCGGCTGACCGTGGACAAGTCCC |
| | | GGTGGCAGGAAGGCAACGTCTTCTCCTGCTCCGTGAT |
| | | GCACGAGGCCCTGCACAACCACTACACCCAGAAGTCC |
| | | CTGTCCCTGTCTCTGGGCX₁X₂X₃, wherein X₁ |
| | | is A, X₂ is A, and X₃ is G; or X₁ is |
| | | absent, X₂ is absent, and X₃ is |
| | | absent. |
| SEQ ID NO: 475 | 374.B | EVQLLESGGGLVQPGGSLRLSCAASGFTFSYNAMSWV |
| | Heavy | RQAPGKGLEWVSSISGTGGSTYYADSVKGRFTISRDN |
| | chain | SKNTLYLQMNSLRAEDTAVYYCARGGLYGSGSYLSDF |
| | | DLWGRGTLVTVSSASTKGPSVFPLAPCSRSTSESTAA |
| | | LGCLVKDYFPEPVTVSWNSGALTSGVHTFPAVLQSSG |
| | | LYSLSSVVTVPSSSLGTKTYTCNVDHKPSNTKVDKRV |
| | | ESKYGPPCPPCPAPEFEGGPSVFLFPPKPKDTLMISR |
| | | TPEVTCVVVDVSQEDPEVQFNWYVDGVEVHNAKTKPR |
| | | EEQFNSTYRVVSVLTVLHQDWLNGKEYKCKVSNKGLP |
| | | SSIEKTISKAKGQPREPQVYTLPPSQEEMTKNQVSLT |
| | | CLVKGFYPSDIAVEWESNGQPENNYKTTPPVLDSDGS |
| | | FFLYSRLTVDKSRWQEGNVFSCSVMHEALHNHYTQKS |
| | | LSLSLGX, wherein X is K or absent |
| SEQ ID NO: 407 | LCDR1 | RASQSVGSNLA |
| (Combined) | | |
| SEQ ID NO: 408 | LCDR2 | GASTRAT |
| (Combined) | | |
| SEQ ID NO: 409 | LCDR3 | QQHNAFPYT |
| (Combined) | | |
| SEQ ID NO: 407 (Kabat) | LCDR1 | RASQSVGSNLA |
| SEQ ID NO: 408 (Kabat) | LCDR2 | GASTRAT |
| SEQ ID NO: 409 (Kabat) | LCDR3 | QQHNAFPYT |
| SEQ ID NO: 410 (Chothia) | LCDR1 | SQSVGSN |
| SEQ ID NO: 411 (Chothia) | LCDR2 | GAS |
| SEQ ID NO: 412 (Chothia) | LCDR3 | HNAFPY |
| SEQ ID NO: 413 (IMGT) | LCDR1 | QSVGSN |
| SEQ ID NO: 411 (IMGT) | LCDR2 | GAS |
| SEQ ID NO: 409 (IMGT) | LCDR3 | QQHNAFPYT |
| SEQ ID NO: 407 | LCDR1 | RASQSVGSNLA |
| (Alternative) | | |
| SEQ ID NO: 408 | LCDR2 | GASTRAT |
| (Alternative) | | |
| SEQ ID NO: 409 | LCDR3 | QQHNAFPYT |
| (Alternative) | | |
| SEQ ID NO: 414 | VL | EIVLTQSPATLSVSPGERATLSCRASQSVGSNLAWYQ |
| | | QKPGQAPRLLIYGASTRATGIPARFSGSGSGTEFTLT |
| | | ISSLQSEDFAVYYCQQHNAFPYTFGGGTKVEIK |
| SEQ ID NO: 415 | DNA VL | GAGATCGTGCTGACACAGTCCCCTGCCACCCTGTCTG |
| | | TGTCTCCCGGCGAGAGAGCCACCCTGAGCTGCAGAGC |
| | | CTCCCAGTCCGTGGGCTCCAACCTGGCCTGGTATCAG |
| | | CAGAAGCCCGGCCAGGCCCCTCGGCTGCTGATCTACG |
| | | GCGCCTCTACCAGAGCCACCGGCATCCCTGCCAGATT |
| | | CTCCGGCTCTGGCTCCGGCACCGAGTTCACCCTGACC |
| | | ATCTCCAGCCTGCAGTCCGAGGACTTCGCCGTGTACT |
| | | ACTGCCAGCAGCACAACGCCTTCCCTTACACCTTCGG |
| | | CGGAGGCACCAAAGTGGAAATCAAG |
| SEQ ID NO: 416 | Light | EIVLTQSPATLSVSPGERATLSCRASQSVGSNLAWYQ |
| | Chain | QKPGQAPRLLIYGASTRATGIPARFSGSGSGTEFTLT |
| | | ISSLQSEDFAVYYCQQHNAFPYTFGGGTKVEIKRTVA |
| | | APSVFIFPPSDEQLKSGTASVVCLLNNFYPREAKVQW |
| | | KVDNALQSGNSQESVTEQDSKDSTYSLSSTLTLSKAD |
| | | YEKHKVYACEVTHQGLSSPVTKSFNRGEC |
| SEQ ID NO: 417 | DNA | GAGATCGTGCTGACACAGTCCCCTGCCACCCTGTCTG |
| | Light | TGTCTCCCGGCGAGAGAGCCACCCTGAGCTGCAGAGC |
| | Chain | CTCCCAGTCCGTGGGCTCCAACCTGGCCTGGTATCAG |
| | | CAGAAGCCCGGCCAGGCCCCTCGGCTGCTGATCTACG |
| | | GCGCCTCTACCAGAGCCACCGGCATCCCTGCCAGATT |
| | | CTCCGGCTCTGGCTCCGGCACCGAGTTCACCCTGACC |
| | | ATCTCCAGCCTGCAGTCCGAGGACTTCGCCGTGTACT |
| | | ACTGCCAGCAGCACAACGCCTTCCCTTACACCTTCGG |
| | | CGGAGGCACCAAAGTGGAAATCAAGCGTACGGTGGCC |
| | | GCTCCCTCCGTGTTCATCTTCCCACCCTCCGACGAGC |
| | | AGCTGAAGTCCGGCACCGCCTCCGTCGTGTGCCTGCT |
| | | GAACAACTTCTACCCTCGCGAGGCCAAAGTGCAGTGG |
| | | AAAGTGGACAACGCCCTGCAGTCCGGCAACTCCCAGG |
| | | AATCCGTCACCGAGCAGGACTCCAAGGACAGCACCTA |
| | | CTCCCTGTCCTCCACCCTGACCCTGTCCAAGGCCGAC |
| | | TACGAGAAGCACAAAGTGTACGCCTGCGAAGTGACCC |
| | | ACCAGGGCCTGTCCAGCCCCGTGACCAAGTCCTTCAA |
| | | CCGGGGCGAGTGC |
| 379 | | |
| SEQ ID NO: 440 | HCDR1 | GFTFSRYAMS |
| (Combined) | | |
| SEQ ID NO: 430 | HCDR2 | SISGTGGSTYYADSVKG |
| (Combined) | | |
| SEQ ID NO: 396 | HCDR3 | GGLYGSGSYLSDFDL |
| (Combined) | | |
| SEQ ID NO: 397 (Kabat) | HCDR1 | RYAMS |
| SEQ ID NO: 430 (Kabat) | HCDR2 | SISGTGGSTYYADSVKG |
| SEQ ID NO: 396 (Kabat) | HCDR3 | GGLYGSGSYLSDFDL |
| SEQ ID NO: 441 (Chothia) | HCDR1 | GFTFSRY |
| SEQ ID NO: 433 (Chothia) | HCDR2 | SGTGGS |
| SEQ ID NO: 396 (Chothia) | HCDR3 | GGLYGSGSYLSDFDL |
| SEQ ID NO: 442 (IMGT) | HCDR1 | GFTFSRYA |
| SEQ ID NO: 435 (IMGT) | HCDR2 | ISGTGGST |
| SEQ ID NO: 402 (IMGT) | HCDR3 | ARGGLYGSGSYLSDFDL |
| SEQ ID NO: 532 | HCDR1 | FTFSRYAMS |
| (Alternative) | | |
| SEQ ID NO: 430 | HCDR2 | SISGTGGSTYYADSVKG |
| (Alternative) | | |
| SEQ ID NO: 402 | HCDR3 | ARGGLYGSGSYLSDFDL |
| (Alternative) | | |
| SEQ ID NO: 443 | VH | EVQLLESGGGLVQPGGSLRLSCAASGFTFSRYAMSWV |
| | | RQAPGKGLEWVSSISGTGGSTYYADSVKGRFTISRDN |
| | | SKNTLYLQMNSLRAEDTAVYYCARGGLYGSGSYLSDF |
| | | DLWGRGTLVTVSS |
| SEQ ID NO: 444 | DNA VH | GAAGTGCAGCTGCTGGAATCTGGCGGCGGACTGGTGC |
| | | AGCCTGGCGGCTCCCTGAGACTGTCTTGCGCCGCCTC |
| | | CGGCTTCACCTTCTCCAGATACGCCATGTCCTGGGTC |
| | | CGACAGGCCCCTGGCAAGGGCCTGGAGTGGGTGTCCT |
| | | CCATCTCCGGCACCGGCGGCTCCACCTACTACGCCGA |
| | | CTCTGTGAAGGGCCGGTTCACCATCTCCCGGGACAAC |
| | | TCCAAGAACACCCTGTACCTGCAGATGAACTCCCTGC |
| | | GGGCCGAGGACACCGCCGTGTACTACTGTGCCAGAGG |
| | | CGGCCTGTACGGCTCCGGCTCCTACCTGTCCGACTTC |
| | | GACCTGTGGGGCAGAGGCACCCTGGTCACCGTGTCCT |
| | | CC |
| SEQ ID NO: 445 | 379.A | EVQLLESGGGLVQPGGSLRLSCAASGFTFSRYAMSWV |
| | Heavy | RQAPGKGLEWVSSISGTGGSTYYADSVKGRFTISRDN |
| | Chain | SKNTLYLQMNSLRAEDTAVYYCARGGLYGSGSYLSDF |
| | | DLWGRGTLVTVSSASTKGPSVFPLAPCSRSTSESTAA |
| | | LGCLVKDYFPEPVTVSWNSGALTSGVHTFPAVLQSSG |
| | | LYSLSSVVTVPSSSLGTKTYTCNVDHKPSNTKVDKRV |
| | | ESKYGPPCPPCPAPEFLGGPSVFLFPPKPKDTLMISR |
| | | TPEVTCVVVDVSQEDPEVQFNWYVDGVEVHNAKTKPR |
| | | EEQFNSTYRVVSVLTVLHQDWLNGKEYKCKVSNKGLP |
| | | SSIEKTISKAKGQPREPQVYTLPPSQEEMTKNQVSLT |
| | | CLVKGFYPSDIAVEWESNGQPENNYKTTPPVLDSDGS |
| | | FFLYSRLTVDKSRWQEGNVFSCSVMHEALHNHYTQKS |
| | | LSLSLGX, wherein X is K or absent |
| SEQ ID NO: 446 | 379.A | GAAGTGCAGCTGCTGGAATCTGGCGGCGGACTGGTGC |
| | DNA | AGCCTGGCGGCTCCCTGAGACTGTCTTGCGCCGCCTC |
| | Heavy | CGGCTTCACCTTCTCCAGATACGCCATGTCCTGGGTC |
| | Chain | CGACAGGCCCCTGGCAAGGGCCTGGAGTGGGTGTCCT |
| | | CCATCTCCGGCACCGGCGGCTCCACCTACTACGCCGA |
| | | CTCTGTGAAGGGCCGGTTCACCATCTCCCGGGACAAC |
| | | TCCAAGAACACCCTGTACCTGCAGATGAACTCCCTGC |
| | | GGGCCGAGGACACCGCCGTGTACTACTGTGCCAGAGG |
| | | CGGCCTGTACGGCTCCGGCTCCTACCTGTCCGACTTC |
| | | GACCTGTGGGGCAGAGGCACCCTGGTCACCGTGTCCT |
| | | CCGCCTCCACAAAGGGCCCCTCCGTGTTCCCTCTGGC |
| | | CCCTTGCTCCCGGTCCACCTCCGAGTCTACCGCCGCT |
| | | CTGGGCTGCCTCGTGAAGGACTACTTCCCCGAGCCCG |
| | | TGACCGTGTCCTGGAACTCTGGCGCCCTGACCTCCGG |
| | | CGTGCACACCTTCCCTGCCGTGCTGCAGTCCTCCGGC |
| | | CTGTACTCCCTGTCCAGCGTCGTGACCGTGCCCTCCT |
| | | CCAGCCTGGGCACCAAGACCTACACCTGTAACGTGGA |
| | | CCACAAGCCCTCCAACACCAAAGTGGACAAGCGGGTG |
| | | GAATCTAAGTACGGCCCTCCCTGCCCTCCTTGCCCTG |
| | | CCCCTGAGTTCCTGGGCGGACCTTCCGTGTTCCTGTT |
| | | CCCTCCAAAGCCCAAGGACACCCTGATGATCTCCCGG |
| | | ACCCCTGAAGTGACCTGCGTGGTGGTGGACGTGTCCC |
| | | AGGAAGATCCCGAAGTCCAGTTCAATTGGTACGTGGA |
| | | CGGCGTGGAAGTGCACAACGCCAAGACCAAGCCCAGA |
| | | GAGGAACAGTTCAACTCCACCTACCGGGTGGTGTCCG |
| | | TGCTGACCGTGCTGCACCAGGACTGGCTGAACGGCAA |
| | | AGAGTACAAGTGCAAAGTGTCCAACAAGGGCCTGCCC |
| | | TCCAGCATCGAAAAGACCATCTCCAAGGCCAAGGGCC |
| | | AGCCCCGCGAGCCCCAAGTGTACACCCTGCCTCCCAG |
| | | CCAGGAAGAGATGACCAAGAATCAAGTGTCCCTGACT |
| | | TGTCTGGTCAAGGGCTTCTACCCCTCCGATATCGCCG |
| | | TGGAGTGGGAGTCCAACGGCCAGCCCGAGAACAACTA |
| | | CAAGACCACCCCTCCCGTGCTGGACTCCGACGGCTCC |
| | | TTCTTCCTGTACTCTCGGCTGACCGTGGACAAGTCCC |
| | | GGTGGCAGGAAGGCAACGTCTTCTCCTGCTCCGTGAT |
| | | GCACGAGGCCCTGCACAACCACTACACCCAGAAGTCC |
| | | CTGTCCCTGTCTCTGGGCX₁X₂X₃, wherein X₁ |
| | | is A, X₂ is A, and X₃ is G; or X₁ is |
| | | absent, X₂ is absent, and X₃ is |
| | | absent. |
| SEQ ID NO: 476 | 379.B | EVQLLESGGGLVQPGGSLRLSCAASGFTFSRYAMSWV |
| | Heavy | RQAPGKGLEWVSSISGTGGSTYYADSVKGRFTISRDN |
| | chain | SKNTLYLQMNSLRAEDTAVYYCARGGLYGSGSYLSDF |
| | | DLWGRGTLVTVSSASTKGPSVFPLAPCSRSTSESTAA |
| | | LGCLVKDYFPEPVTVSWNSGALTSGVHTFPAVLQSSG |
| | | LYSLSSVVTVPSSSLGTKTYTCNVDHKPSNTKVDKRV |
| | | ESKYGPPCPPCPAPEFEGGPSVFLFPPKPKDTLMISR |
| | | TPEVTCVVVDVSQEDPEVQFNWYVDGVEVHNAKTKPR |
| | | EEQFNSTYRVVSVLTVLHQDWLNGKEYKCKVSNKGLP |
| | | SSIEKTISKAKGQPREPQVYTLPPSQEEMTKNQVSLT |
| | | CLVKGFYPSDIAVEWESNGQPENNYKTTPPVLDSDGS |
| | | FFLYSRLTVDKSRWQEGNVFSCSVMHEALHNHYTQKS |
| | | LSLSLGX, wherein X is K or absent |
| SEQ ID NO: 407 | LCDR1 | RASQSVGSNLA |
| (Combined) | | |
| SEQ ID NO: 408 | LCDR2 | GASTRAT |
| (Combined) | | |
| SEQ ID NO: 409 | LCDR3 | QQHNAFPYT |
| (Combined) | | |
| SEQ ID NO: 407 (Kabat) | LCDR1 | RASQSVGSNLA |
| SEQ ID NO: 408 (Kabat) | LCDR2 | GASTRAT |
| SEQ ID NO: 409 (Kabat) | LCDR3 | QQHNAFPYT |
| SEQ ID NO: 410 (Chothia) | LCDR1 | SQSVGSN |
| SEQ ID NO: 411 (Chothia) | LCDR2 | GAS |
| SEQ ID NO: 412 (Chothia) | LCDR3 | HNAFPY |
| SEQ ID NO: 413 (IMGT) | LCDR1 | QSVGSN |
| SEQ ID NO: 411 (IMGT) | LCDR2 | GAS |
| SEQ ID NO: 409 (IMGT) | LCDR3 | QQHNAFPYT |
| SEQ ID NO: 407 | LCDR1 | RASQSVGSNLA |
| (Alternative) | | |
| SEQ ID NO: 408 | LCDR2 | GASTRAT |
| (Alternative) | | |
| SEQ ID NO: 409 | LCDR3 | QQHNAFPYT |
| (Alternative) | | |
| SEQ ID NO: 414 | VL | EIVLTQSPATLSVSPGERATLSCRASQSVGSNLAWYQ |
| | | QKPGQAPRLLIYGASTRATGIPARFSGSGSGTEFTLT |
| | | ISSLQSEDFAVYYCQQHNAFPYTFGGGTKVEIK |
| SEQ ID NO: 415 | DNA VL | GAGATCGTGCTGACACAGTCCCCTGCCACCCTGTCTG |
| | | TGTCTCCCGGCGAGAGAGCCACCCTGAGCTGCAGAGC |
| | | CTCCCAGTCCGTGGGCTCCAACCTGGCCTGGTATCAG |
| | | CAGAAGCCCGGCCAGGCCCCTCGGCTGCTGATCTACG |
| | | GCGCCTCTACCAGAGCCACCGGCATCCCTGCCAGATT |
| | | CTCCGGCTCTGGCTCCGGCACCGAGTTCACCCTGACC |
| | | ATCTCCAGCCTGCAGTCCGAGGACTTCGCCGTGTACT |
| | | ACTGCCAGCAGCACAACGCCTTCCCTTACACCTTCGG |
| | | CGGAGGCACCAAAGTGGAAATCAAG |
| SEQ ID NO: 416 | Light | EIVLTQSPATLSVSPGERATLSCRASQSVGSNLAWYQ |
| | Chain | QKPGQAPRLLIYGASTRATGIPARFSGSGSGTEFTLT |
| | | ISSLQSEDFAVYYCQQHNAFPYTFGGGTKVEIKRTVA |
| | | APSVFIFPPSDEQLKSGTASVVCLLNNFYPREAKVQW |
| | | KVDNALQSGNSQESVTEQDSKDSTYSLSSTLTLSKAD |
| | | YEKHKVYACEVTHQGLSSPVTKSFNRGEC |
| SEQ ID NO: 417 | DNA | GAGATCGTGCTGACACAGTCCCCTGCCACCCTGTCTG |
| | Light | TGTCTCCCGGCGAGAGAGCCACCCTGAGCTGCAGAGC |
| | Chain | CTCCCAGTCCGTGGGCTCCAACCTGGCCTGGTATCAG |
| | | CAGAAGCCCGGCCAGGCCCCTCGGCTGCTGATCTACG |
| | | GCGCCTCTACCAGAGCCACCGGCATCCCTGCCAGATT |
| | | CTCCGGCTCTGGCTCCGGCACCGAGTTCACCCTGACC |
| | | ATCTCCAGCCTGCAGTCCGAGGACTTCGCCGTGTACT |
| | | ACTGCCAGCAGCACAACGCCTTCCCTTACACCTTCGG |
| | | CGGAGGCACCAAAGTGGAAATCAAGCGTACGGTGGCC |
| | | GCTCCCTCCGTGTTCATCTTCCCACCCTCCGACGAGC |
| | | AGCTGAAGTCCGGCACCGCCTCCGTCGTGTGCCTGCT |
| | | GAACAACTTCTACCCTCGCGAGGCCAAAGTGCAGTGG |
| | | AAAGTGGACAACGCCCTGCAGTCCGGCAACTCCCAGG |
| | | AATCCGTCACCGAGCAGGACTCCAAGGACAGCACCTA |
| | | CTCCCTGTCCTCCACCCTGACCCTGTCCAAGGCCGAC |
| | | TACGAGAAGCACAAAGTGTACGCCTGCGAAGTGACCC |
| | | ACCAGGGCCTGTCCAGCCCCGTGACCAAGTCCTTCAA |
| | | CCGGGGCGAGTGC |
| 376 | | |
| SEQ ID NO: 492 | HCDR1 | GFTFRSYAMS |
| (Combined) | | |
| SEQ ID NO: 493 | HCDR2 | AITGSGGLTYYADSVKG |
| (Combined) | | |
| SEQ ID NO: 396 | HCDR3 | GGLYGSGSYLSDFDL |
| (Combined) | | |
| SEQ ID NO: 494 (Kabat) | HCDR1 | SYAMS |
| SEQ ID NO: 493 (Kabat) | HCDR2 | AITGSGGLTYYADSVKG |
| SEQ ID NO: 396 (Kabat) | HCDR3 | GGLYGSGSYLSDFDL |
| SEQ ID NO: 495 (Chothia) | HCDR1 | GFTFRSY |
| SEQ ID NO: 496 (Chothia) | HCDR2 | TGSGGL |
| SEQ ID NO: 396 (Chothia) | HCDR3 | GGLYGSGSYLSDFDL |
| SEQ ID NO: 497 (IMGT) | HCDR1 | GFTFRSYA |
| SEQ ID NO: 498 (IMGT) | HCDR2 | ITGSGGLT |
| SEQ ID NO: 402 (IMGT) | HCDR3 | ARGGLYGSGSYLSDFDL |
| SEQ ID NO: 533 | HCDR1 | FTFRSYAMS |
| (Alternative) | | |
| SEQ ID NO: 493 | HCDR2 | AITGSGGLTYYADSVKG |
| (Alternative) | | |
| SEQ ID NO: 402 | HCDR3 | ARGGLYGSGSYLSDFDL |
| (Alternative) | | |
| SEQ ID NO: 499 | VH | EVQLLESGGGLVQPGGSLRLSCAASGFTFRSYAMSWV |
| | | RQAPGKGLEWVSAITGSGGLTYYADSVKGRFTISRDN |
| | | SKNTLYLQMNSLRAEDTAVYYCARGGLYGSGSYLSDF |
| | | DLWGRGTLVTVSS |
| SEQ ID NO: 500 | DNA VH | GAGGTGCAGCTGTTGGAGTCTGGGGGAGGCTTGGTAC |
| | | AGCCTGGGGGGTCCCTGAGACTCTCCTGTGCAGCCTC |
| | | TGGATTCACCTTTCGTAGCTATGCCATGAGCTGGGTC |
| | | CGCCAGGCTCCAGGGAAGGGGCTGGAGTGGGTCTCAG |
| | | CTATTACGGGAAGTGGTGGTTTGACATACTACGCAGA |
| | | CTCCGTGAAGGGCCGGTTCACCATCTCCAGAGACAAT |
| | | TCCAAGAACACGCTGTATCTGCAAATGAACAGCCTGA |
| | | GAGCCGAGGACACGGCGGTGTACTACTGCGCCAGAGG |
| | | TGGATTGTACGGAAGCGGAAGCTACTTGAGTGACTTC |
| | | GACCTATGGGGGAGAGGTACCTTGGTCACCGTCTCCT |
| | | CA |
| SEQ ID NO: 407 | LCDR1 | RASQSVGSNLA |
| (Combined) | | |
| SEQ ID NO: 408 | LCDR2 | GASTRAT |
| (Combined) | | |
| SEQ ID NO: 409 | LCDR3 | QQHNAFPYT |
| (Combined) | | |
| SEQ ID NO: 407 (Kabat) | LCDR1 | RASQSVGSNLA |
| SEQ ID NO: 408 (Kabat) | LCDR2 | GASTRAT |
| SEQ ID NO: 409 (Kabat) | LCDR3 | QQHNAFPYT |
| SEQ ID NO: 410 (Chothia) | LCDR1 | SQSVGSN |
| SEQ ID NO: 411 (Chothia) | LCDR2 | GAS |
| SEQ ID NO: 412 (Chothia) | LCDR3 | HNAFPY |
| SEQ ID NO: 413 (IMGT) | LCDR1 | QSVGSN |
| SEQ ID NO: 411 (IMGT) | LCDR2 | GAS |
| SEQ ID NO: 409 (IMGT) | LCDR3 | QQHNAFPYT |
| SEQ ID NO: 407 | LCDR1 | RASQSVGSNLA |
| (Alternative) | | |
| SEQ ID NO: 408 | LCDR2 | GASTRAT |
| (Alternative) | | |
| SEQ ID NO: 409 | LCDR3 | QQHNAFPYT |
| (Alternative) | | |
| SEQ ID NO: 414 | VL | EIVLTQSPATLSVSPGERATLSCRASQSVGSNLAWYQ |
| | | QKPGQAPRLLIYGASTRATGIPARFSGSGSGTEFTLT |
| | | ISSLQSEDFAVYYCQQHNAFPYTFGGGTKVEIK |
| SEQ ID NO: 501 | DNA VL | GAAATAGTGTTGACGCAGTCTCCAGCCACCCTGTCTG |
| | | TGTCTCCAGGGGAAAGAGCCACCCTCTCCTGCAGGGC |
| | | CAGTCAGAGTGTTGGCAGCAACTTAGCCTGGTACCAG |
| | | CAGAAACCTGGCCAGGCTCCCAGGCTCCTCATCTATG |
| | | GTGCATCCACCAGGGCCACTGGTATCCCAGCCAGGTT |
| | | CAGTGGCAGTGGGTCTGGGACAGAGTTCACTCTCACC |
| | | ATCAGCAGCCTGCAGTCTGAAGATTTTGCAGTTTATT |
| | | ACTGTCAGCAGCACAATGCCTTCCCTTACACTTTTGG |
| | | CGGAGGGACCAAGGTTGAGATCAAA |
| 377 | | |
| SEQ ID NO: 502 | HCDR1 | GFTFKSYAMS |
| (Combined) | | |
| SEQ ID NO: 503 | HCDR2 | AISGSGSYTYYADSVKG |
| (Combined) | | |
| SEQ ID NO: 396 | HCDR3 | GGLYGSGSYLSDFDL |
| (Combined) | | |
| SEQ ID NO: 494 (Kabat) | HCDR1 | SYAMS |
| SEQ ID NO: 503 (Kabat) | HCDR2 | AISGSGSYTYYADSVKG |
| SEQ ID NO: 396 (Kabat) | HCDR3 | GGLYGSGSYLSDFDL |
| SEQ ID NO: 504 (Chothia) | HCDR1 | GFTFKSY |
| SEQ ID NO: 505 (Chothia) | HCDR2 | SGSGSY |
| SEQ ID NO: 396 (Chothia) | HCDR3 | GGLYGSGSYLSDFDL |
| SEQ ID NO: 506 (IMGT) | HCDR1 | GFTFKSYA |
| SEQ ID NO: 507 (IMGT) | HCDR2 | ISGSGSYT |
| SEQ ID NO: 402 (IMGT) | HCDR3 | ARGGLYGSGSYLSDFDL |
| SEQ ID NO: 534 | HCDR1 | FTFKSYAMS |
| (Alternative) | | |
| SEQ ID NO: 503 | HCDR2 | AISGSGSYTYYADSVKG |
| (Alternative) | | |
| SEQ ID NO: 402 | HCDR3 | ARGGLYGSGSYLSDFDL |
| (Alternative) | | |
| SEQ ID NO: 508 | VH | EVQLLESGGGLVQPGGSLRLSCAASGFTFKSYAMSWV |
| | | RQAPGKGLEWVSAISGSGSYTYYADSVKGRFTISRDN |
| | | SKNTLYLQMNSLRAEDTAVYYCARGGLYGSGSYLSDF |
| | | DLWGRGTLVTVSS |
| SEQ ID NO: 509 | DNA VH | GAGGTGCAGCTGTTGGAGTCTGGGGGAGGCTTGGTAC |
| | | AGCCTGGGGGGTCCCTGAGACTCTCCTGTGCAGCCTC |
| | | TGGATTCACCTTTAAGAGCTATGCCATGAGTTGGGTC |
| | | CGCCAGGCTCCAGGGAAGGGGCTGGAGTGGGTCTCAG |
| | | CTATTAGTGGAAGTGGTTCGTATACATACTACGCAGA |
| | | CTCCGTGAAGGGCCGGTTCACCATCTCCAGAGACAAT |
| | | TCCAAGAACACGCTGTATCTGCAAATGAACAGCCTGA |
| | | GAGCCGAGGACACGGCGGTGTACTACTGCGCCAGAGG |
| | | TGGATTGTACGGAAGCGGAAGCTACTTGAGTGACTTC |
| | | GACCTATGGGGGAGAGGTACCTTGGTCACCGTCTCCT |
| | | CA |
| SEQ ID NO: 407 | LCDR1 | RASQSVGSNLA |
| (Combined) | | |
| SEQ ID NO: 408 | LCDR2 | GASTRAT |
| (Combined) | | |
| SEQ ID NO: 409 | LCDR3 | QQHNAFPYT |
| (Combined) | | |
| SEQ ID NO: 407 (Kabat) | LCDR1 | RASQSVGSNLA |
| SEQ ID NO: 408 (Kabat) | LCDR2 | GASTRAT |
| SEQ ID NO: 409 (Kabat) | LCDR3 | QQHNAFPYT |
| SEQ ID NO: 410 (Chothia) | LCDR1 | SQSVGSN |
| SEQ ID NO: 411 (Chothia) | LCDR2 | GAS |
| SEQ ID NO: 412 (Chothia) | LCDR3 | HNAFPY |
| SEQ ID NO: 413 (IMGT) | LCDR1 | QSVGSN |
| SEQ ID NO: 411 (IMGT) | LCDR2 | GAS |
| SEQ ID NO: 409 (IMGT) | LCDR3 | QQHNAFPYT |
| SEQ ID NO: 407 | LCDR1 | RASQSVGSNLA |
| (Alternative) | | |
| SEQ ID NO: 408 | LCDR2 | GASTRAT |
| (Alternative) | | |
| SEQ ID NO: 409 | LCDR3 | QQHNAFPYT |
| (Alternative) | | |
| SEQ ID NO: 414 | VL | EIVLTQSPATLSVSPGERATLSCRASQSVGSNLAWYQ |
| | | QKPGQAPRLLIYGASTRATGIPARFSGSGSGTEFTLT |
| | | ISSLQSEDFAVYYCQQHNAFPYTFGGGTKVEIK |
| SEQ ID NO: 501 | DNA VL | GAAATAGTGTTGACGCAGTCTCCAGCCACCCTGTCTG |
| | | TGTCTCCAGGGGAAAGAGCCACCCTCTCCTGCAGGGC |
| | | CAGTCAGAGTGTTGGCAGCAACTTAGCCTGGTACCAG |
| | | CAGAAACCTGGCCAGGCTCCCAGGCTCCTCATCTATG |
| | | GTGCATCCACCAGGGCCACTGGTATCCCAGCCAGGTT |
| | | CAGTGGCAGTGGGTCTGGGACAGAGTTCACTCTCACC |
| | | ATCAGCAGCCTGCAGTCTGAAGATTTTGCAGTTTATT |
| | | ACTGTCAGCAGCACAATGCCTTCCCTTACACTTTTGG |
| | | CGGAGGGACCAAGGTTGAGATCAAA |
| 930 | | |
| SEQ ID NO: 510 | HCDR1 | GFTFSSYAMS |
| (Combined) | | |
| SEQ ID NO: 511 | HCDR2 | AISGSGGSTYYADSVKG |
| (Combined) | | |
| SEQ ID NO: 396 | HCDR3 | GGLYGSGSYLSDFDL |
| (Combined) | | |
| SEQ ID NO: 494 (Kabat) | HCDR1 | SYAMS |
| SEQ ID NO: 511 (Kabat) | HCDR2 | AISGSGGSTYYADSVKG |
| SEQ ID NO: 396 (Kabat) | HCDR3 | GGLYGSGSYLSDFDL |
| SEQ ID NO: 512 (Chothia) | HCDR1 | GFTFSSY |
| SEQ ID NO: 513 (Chothia) | HCDR2 | SGSGGS |
| SEQ ID NO: 396 (Chothia) | HCDR3 | GGLYGSGSYLSDFDL |
| SEQ ID NO: 514 (IMGT) | HCDR1 | GFTFSSYA |
| SEQ ID NO: 515 (IMGT) | HCDR2 | ISGSGGST |
| SEQ ID NO: 402 (IMGT) | HCDR3 | ARGGLYGSGSYLSDFDL |
| SEQ ID NO: 535 | HCDR1 | FTFSSYAMS |
| (Alternative) | | |
| SEQ ID NO: 511 | HCDR2 | AISGSGGSTYYADSVKG |
| (Alternative) | | |
| SEQ ID NO: 402 | HCDR3 | ARGGLYGSGSYLSDFDL |
| (Alternative) | | |
| SEQ ID NO: 516 | VH | EVQLLESGGGLVQPGGSLRLSCAASGFTFSSYAMSWV |
| | | RQAPGKGLEWVSAISGSGGSTYYADSVKGRFTISRDN |
| | | SKNTLYLQMNSLRAEDTAVYYCARGGLYGSGSYLSDF |
| | | DLWGRGTLVTVSS |
| SEQ ID NO: 517 | DNA VH | GAGGTGCAGCTGTTGGAGTCTGGGGGAGGCTTGGTAC |
| | | AGCCTGGGGGGTCCCTGAGACTCTCCTGTGCAGCCTC |
| | | TGGATTCACCTTTAGCAGCTATGCCATGAGCTGGGTC |
| | | CGCCAGGCTCCAGGGAAGGGGCTGGAGTGGGTCTCAG |
| | | CTATTAGTGGTAGTGGTGGTAGCACATACTACGCAGA |
| | | CTCCGTGAAGGGCCGGTTCACCATCTCCAGAGACAAT |
| | | TCCAAGAACACGCTGTATCTGCAAATGAACAGCCTGA |
| | | GAGCCGAGGACACGGCGGTGTACTACTGCGCCAGAGG |
| | | TGGATTGTACGGAAGCGGAAGCTACTTGAGTGACTTC |
| | | GACCTATGGGGGAGAGGTACCTTGGTCACCGTCTCCT |
| | | CA |
| SEQ ID NO: 407 | LCDR1 | RASQSVGSNLA |
| (Combined) | | |
| SEQ ID NO: 408 | LCDR2 | GASTRAT |
| (Combined) | | |
| SEQ ID NO: 409 | LCDR3 | QQHNAFPYT |
| (Combined) | | |
| SEQ ID NO: 407 (Kabat) | LCDR1 | RASQSVGSNLA |
| SEQ ID NO: 408 (Kabat) | LCDR2 | GASTRAT |
| SEQ ID NO: 409 (Kabat) | LCDR3 | QQHNAFPYT |
| SEQ ID NO: 410 (Chothia) | LCDR1 | SQSVGSN |
| SEQ ID NO: 411 (Chothia) | LCDR2 | GAS |
| SEQ ID NO: 412 (Chothia) | LCDR3 | HNAFPY |
| SEQ ID NO: 413 (IMGT) | LCDR1 | QSVGSN |
| SEQ ID NO: 411 (IMGT) | LCDR2 | GAS |
| SEQ ID NO: 409 (IMGT) | LCDR3 | QQHNAFPYT |
| SEQ ID NO: 407 | LCDR1 | RASQSVGSNLA |
| (Alternative) | | |
| SEQ ID NO: 408 | LCDR2 | GASTRAT |
| (Alternative) | | |
| SEQ ID NO: 409 | LCDR3 | QQHNAFPYT |
| (Alternative) | | |
| SEQ ID NO: 414 | VL | EIVLTQSPATLSVSPGERATLSCRASQSVGSNLAWYQ |
| | | QKPGQAPRLLIYGASTRATGIPARFSGSGSGTEFTLT |
| | | ISSLQSEDFAVYYCQQHNAFPYTFGGGTKVEIK |
| SEQ ID NO: 501 | DNA VL | GAAATAGTGTTGACGCAGTCTCCAGCCACCCTGTCTG |
| | | TGTCTCCAGGGGAAAGAGCCACCCTCTCCTGCAGGGC |
| | | CAGTCAGAGTGTTGGCAGCAACTTAGCCTGGTACCAG |
| | | CAGAAACCTGGCCAGGCTCCCAGGCTCCTCATCTATG |
| | | GTGCATCCACCAGGGCCACTGGTATCCCAGCCAGGTT |
| | | CAGTGGCAGTGGGTCTGGGACAGAGTTCACTCTCACC |
| | | ATCAGCAGCCTGCAGTCTGAAGATTTTGCAGTTTATT |
| | | ACTGTCAGCAGCACAATGCCTTCCCTTACACTTTTGG |
| | | CGGAGGGACCAAGGTTGAGATCAAA |
| 918 | | |
| SEQ ID NO: 518 | HCDR1 | GGSISSYYWS |
| (Combined) | | |
| SEQ ID NO: 519 | HCDR2 | YIYSSGSTNYNPSLKS |
| (Combined) | | |
| SEQ ID NO: 362 | HCDR3 | ESQESPYNNWFDP |
| (Combined) | | |
| SEQ ID NO: 520 (Kabat) | HCDR1 | SYYWS |
| SEQ ID NO: 519 (Kabat) | HCDR2 | YIYSSGSTNYNPSLKS |
| SEQ ID NO: 362 (Kabat) | HCDR3 | ESQESPYNNWFDP |
| SEQ ID NO: 521 (Chothia) | HCDR1 | GGSISSY |
| SEQ ID NO: 522 (Chothia) | HCDR2 | YSSGS |
| SEQ ID NO: 362 (Chothia) | HCDR3 | ESQESPYNNWFDP |
| SEQ ID NO: 523 (IMGT) | HCDR1 | GGSISSYY |
| SEQ ID NO: 524 (IMGT) | HCDR2 | IYSSGST |
| SEQ ID NO: 368 (IMGT) | HCDR3 | ARESQESPYNNWFDP |
| SEQ ID NO: 540 | HCDR1 | GSISSYYWS |
| (Alternative) | | |
| SEQ ID NO: 519 | HCDR2 | YIYSSGSTNYNPSLKS |
| (Alternative) | | |
| SEQ ID NO: 368 | HCDR3 | ARESQESPYNNWFDP |
| (Alternative) | | |
| SEQ ID NO: 525 | VH | QVQLQESGPGLVKPSETLSLTCTVSGGSISSYYWSWI |
| | | RQPPGKGLEWIGYIYSSGSTNYNPSLKSRVTISVDTS |
| | | KNQFSLKLSSVTAADTAVYYCARESQESPYNNWFDPW |
| | | GQGTLVTVSS |
| SEQ ID NO: 526 | DNA VH | CAGGTGCAGCTGCAGGAGTCGGGCCCAGGACTGGTGA |
| | | AGCCTTCGGAGACCCTGTCCCTCACCTGCACTGTCTC |
| | | TGGTGGCTCCATCAGTAGTTACTACTGGAGCTGGATC |
| | | CGGCAGCCCCCAGGGAAGGGACTGGAGTGGATTGGGT |
| | | ATATCTATAGTAGTGGGAGCACCAACTACAACCCCTC |
| | | CCTCAAGAGTCGAGTCACCATATCAGTAGACACGTCC |
| | | AAGAACCAGTTCTCCCTGAAGCTGAGTTCTGTGACCG |
| | | CCGCAGACACGGCGGTGTACTACTGCGCCAGAGAATC |
| | | TCAGGAGAGTCCATACAACAATTGGTTCGACCCATGG |
| | | GGACAGGGTACATTGGTCACCGTCTCCTCA |
| SEQ ID NO: 373 | LCDR1 | RASQGISSWLA |
| (Combined) | | |
| SEQ ID NO: 374 | LCDR2 | AASSLQS |
| (Combined) | | |
| SEQ ID NO: 375 | LCDR3 | QQGNSFPRT |
| (Combined) | | |
| SEQ ID NO: 373 (Kabat) | LCDR1 | RASQGISSWLA |
| SEQ ID NO: 374 (Kabat) | LCDR2 | AASSLQS |
| SEQ ID NO: 375 (Kabat) | LCDR3 | QQGNSFPRT |
| SEQ ID NO: 376 (Chothia) | LCDR1 | SQGISSW |
| SEQ ID NO: 377 (Chothia) | LCDR2 | AAS |
| SEQ ID NO: 378 (Chothia) | LCDR3 | GNSFPR |
| SEQ ID NO: 379 (IMGT) | LCDR1 | QGISSW |
| SEQ ID NO: 377 (IMGT) | LCDR2 | AAS |
| SEQ ID NO: 375 (IMGT) | LCDR3 | QQGNSFPRT |
| SEQ ID NO: 373 | LCDR1 | RASQGISSWLA |
| (Alternative) | | |
| SEQ ID NO: 374 | LCDR2 | AASSLQS |
| (Alternative) | | |
| SEQ ID NO: 375 | LCDR3 | QQGNSFPRT |
| (Alternative) | | |
| SEQ ID NO: 380 | VL | DIQMTQSPSSVSASVGDRVTITCRASQGISSWLAWYQ |
| | | QKPGKAPKLLIYAASSLQSGVPSRFSGSGSGTDFTLT |
| | | ISSLQPEDFATYYCQQGNSFPRTFGGGTKVEIK |
| SEQ ID NO: 527 | DNA VL | GACATCCAGATGACCCAGTCTCCATCTTCCGTGTCTG |
| | | CATCTGTAGGAGACAGAGTCACCATCACTTGTCGGGC |
| | | GAGTCAGGGTATTAGCAGCTGGTTAGCCTGGTATCAG |
| | | CAGAAACCAGGGAAAGCCCCTAAGCTCCTGATCTATG |
| | | CTGCATCCAGTTTGCAAAGTGGGGTCCCATCAAGGTT |
| | | CAGCGGCAGTGGATCTGGGACAGATTTCACTCTCACC |
| | | ATCAGCAGCCTGCAGCCTGAAGATTTTGCAACTTATT |
| | | ACTGTCAGCAGGGAAACAGTTTCCCTAGGACTTTTGG |
| | | CGGAGGGACCAAGGTTGAGATCAAA |
| 363 | | |
| SEQ ID NO: 440 | HCDR1 | GFTFSRYAMS |
| (Combined) | | |
| SEQ ID NO: 541 | HCDR2 | AISGTGISTYYADSVKG |
| (Combined) | | |
| SEQ ID NO: 396 | HCDR3 | GGLYGSGSYLSDFDL |
| (Combined) | | |
| SEQ ID NO: 397 (Kabat) | HCDR1 | RYAMS |
| SEQ ID NO: 541 (Kabat) | HCDR2 | AISGTGISTYYADSVKG |
| SEQ ID NO: 396 (Kabat) | HCDR3 | GGLYGSGSYLSDFDL |
| SEQ ID NO: 441 (Chothia) | HCDR1 | GFTFSRY |
| SEQ ID NO: 542 (Chothia) | HCDR2 | SGTGIS |
| SEQ ID NO: 396 (Chothia) | HCDR3 | GGLYGSGSYLSDFDL |
| SEQ ID NO: 442 (IMGT) | HCDR1 | GFTFSRYA |
| SEQ ID NO: 543 (IMGT) | HCDR2 | ISGTGIST |
| SEQ ID NO: 402 (IMGT) | HCDR3 | ARGGLYGSGSYLSDFDL |
| SEQ ID NO: 532 | HCDR1 | FTFSRYAMS |
| (Alternative) | | |
| SEQ ID NO: 541 | HCDR2 | AISGTGISTYYADSVKG |
| (Alternative) | | |
| SEQ ID NO: 402 | HCDR3 | ARGGLYGSGSYLSDFDL |
| (Alternative) | | |
| SEQ ID NO: 544 | VH | EVQLLESGGGLVQPGGSLRLSCAASGFTFSRYAMSWV |
| | | RQAPGKGLEWVSAISGTGISTYYADSVKGRFTISRDN |
| | | SKNTLYLQMNSLRAEDTAVYYCARGGLYGSGSYLSDF |
| | | DLWGRGTLVTVSS |
| SEQ ID NO: 545 | LCDR1 | RASQSISSWLA |
| (Combined) | | |
| SEQ ID NO: 546 | LCDR2 | DASSLES |
| (Combined) | | |
| SEQ ID NO: 547 | LCDR3 | QQSNTFYT |
| (Combined) | | |
| SEQ ID NO: 545 (Kabat) | LCDR1 | RASQSISSWLA |
| SEQ ID NO: 546 (Kabat) | LCDR2 | DASSLES |
| SEQ ID NO: 547 (Kabat) | LCDR3 | QQSNTFYT |
| SEQ ID NO: 548 (Chothia) | LCDR1 | SQSISSW |
| SEQ ID NO: 549 (Chothia) | LCDR2 | DAS |
| SEQ ID NO: 551 (Chothia) | LCDR3 | SNTFY |
| SEQ ID NO: 552 (IMGT) | LCDR1 | QSISSW |
| SEQ ID NO: 549 (IMGT) | LCDR2 | DAS |
| SEQ ID NO: 547 (IMGT) | LCDR3 | QQSNTFYT |
| SEQ ID NO: 545 | LCDR1 | RASQSISSWLA |
| (Alternative) | | |
| SEQ ID NO: 546 | LCDR2 | DASSLES |
| (Alternative) | | |
| SEQ ID NO: 547 | LCDR3 | QQSNTFYT |
| (Alternative) | | |
| SEQ ID NO: 553 | VL | DIQMTQSPSTLSASVGDRVTITCRASQSISSWLAWYQ |
| | | QKPGKAPKLLIYDASSLESGVPSRFSGSGSGIEFTLT |
| | | ISSLQPDDFATYYCQQSNTFYTFGGGTKVEIK |
| 366 | | |
| SEQ ID NO: 440 | HCDR1 | GFTFSRYAMS |
| (Combined) | | |
| SEQ ID NO: 554 | HCDR2 | AISGTGLSTYYADSVKG |
| (Combined) | | |
| SEQ ID NO: 396 | HCDR3 | GGLYGSGSYLSDFDL |
| (Combined) | | |
| SEQ ID NO: 397 (Kabat) | HCDR1 | RYAMS |
| SEQ ID NO: 554 (Kabat) | HCDR2 | AISGTGLSTYYADSVKG |
| SEQ ID NO: 396 (Kabat) | HCDR3 | GGLYGSGSYLSDFDL |
| SEQ ID NO: 441 (Chothia) | HCDR1 | GFTFSRY |
| SEQ ID NO: 555 (Chothia) | HCDR2 | SGTGLS |
| SEQ ID NO: 396 (Chothia) | HCDR3 | GGLYGSGSYLSDFDL |
| SEQ ID NO: 442 (IMGT) | HCDR1 | GFTFSRYA |
| SEQ ID NO: 556 (IMGT) | HCDR2 | ISGTGLST |
| SEQ ID NO: 402 (IMGT) | HCDR3 | ARGGLYGSGSYLSDFDL |
| SEQ ID NO: 532 | HCDR1 | FTFSRYAMS |
| (Alternative) | | |
| SEQ ID NO: 554 | HCDR2 | AISGTGLSTYYADSVKG |
| (Alternative) | | |
| SEQ ID NO: 402 | HCDR3 | ARGGLYGSGSYLSDFDL |
| (Alternative) | | |
| SEQ ID NO: 557 | VH | EVQLLESGGGLVQPGGSLRLSCAASGFTFSRYAMSWV |
| | | RQAPGKGLEWVSAISGTGLSTYYADSVKGRFTISRDN |
| | | SKNTLYLQMNSLRAEDTAVYYCARGGLYGSGSYLSDF |
| | | DLWGRGTLVTVSS |
| SEQ ID NO: 545 | LCDR1 | RASQSISSWLA |
| (Combined) | | |
| SEQ ID NO: 546 | LCDR2 | DASSLES |
| (Combined) | | |
| SEQ ID NO: 547 | LCDR3 | QQSNTFYT |
| (Combined) | | |
| SEQ ID NO: 545 (Kabat) | LCDR1 | RASQSISSWLA |
| SEQ ID NO: 546 (Kabat) | LCDR2 | DASSLES |
| SEQ ID NO: 547 (Kabat) | LCDR3 | QQSNTFYT |
| SEQ ID NO: 548 (Chothia) | LCDR1 | SQSISSW |
| SEQ ID NO: 549 (Chothia) | LCDR2 | DAS |
| SEQ ID NO: 551 (Chothia) | LCDR3 | SNTFY |
| SEQ ID NO: 552 (IMGT) | LCDR1 | QSISSW |
| SEQ ID NO: 549 (IMGT) | LCDR2 | DAS |
| SEQ ID NO: 547 (IMGT) | LCDR3 | QQSNTFYT |
| SEQ ID NO: 545 | LCDR1 | RASQSISSWLA |
| (Alternative) | | |
| SEQ ID NO: 546 | LCDR2 | DASSLES |
| (Alternative) | | |
| SEQ ID NO: 547 | LCDR3 | QQSNTFYT |
| (Alternative) | | |
| SEQ ID NO: 553 | VL | DIQMTQSPSTLSASVGDRVTITCRASQSISSWLAWYQ |
| | | QKPGKAPKLLIYDASSLESGVPSRFSGSGSGIEFTLT |
| | | ISSLQPDDFATYYCQQSNTFYTFGGGTKVEIK |
| 407 | | |
| SEQ ID NO: 558 | HCDR1 | GYTFTYYWMH |
| (Combined) | | |
| SEQ ID NO: 559 | HCDR2 | SINPNSGSTNYAQKFQG |
| (Combined) | | |
| SEQ ID NO: 560 | HCDR3 | DTGGDKSPLTYYYYGMDV |
| (Combined) | | |
| SEQ ID NO: 561 (Kabat) | HCDR1 | YYWMH |
| SEQ ID NO: 559 (Kabat) | HCDR2 | SINPNSGSTNYAQKFQG |
| SEQ ID NO: 560 (Kabat) | HCDR3 | DTGGDKSPLTYYYYGMDV |
| SEQ ID NO: 562 (Chothia) | HCDR1 | GYTFTYY |
| SEQ ID NO: 563 (Chothia) | HCDR2 | NPNSGS |
| SEQ ID NO: 560 (Chothia) | HCDR3 | DTGGDKSPLTYYYYGMDV |
| SEQ ID NO: 564 (IMGT) | HCDR1 | GYTFTYYW |
| SEQ ID NO: 565 (IMGT) | HCDR2 | INPNSGST |
| SEQ ID NO: 566 (IMGT) | HCDR3 | ARDTGGDKSPLTYYYYGMDV |
| SEQ ID NO: 567 | HCDR1 | YTFTYYWMH |
| (Alternative) | | |
| SEQ ID NO: 559 | HCDR2 | SINPNSGSTNYAQKFQG |
| (Alternative) | | |
| SEQ ID NO: 566 | HCDR3 | ARDTGGDKSPLTYYYYGMDV |
| (Alternative) | | |
| SEQ ID NO: 568 | VH | QVQLVQSGAEVKKPGASVKVSCKASGYTFTYYWMHWV |
| | | RQAPGQGLEWMGSINPNSGSTNYAQKFQGRVTMTRDT |
| | | SISTAYMELSRLRSDDTAVYYCARDTGGDKSPLTYYY |
| | | YGMDVWGQGTTVTVSS |
| SEQ ID NO: 569 | LCDR1 | RASQGISRWLA |
| (Combined) | | |
| SEQ ID NO: 374 | LCDR2 | AASSLQS |
| (Combined) | | |
| SEQ ID NO: 570 | LCDR3 | QQAIALPPFT |
| (Combined) | | |
| SEQ ID NO: 569 (Kabat) | LCDR1 | RASQGISRWLA |
| SEQ ID NO: 374 (Kabat) | LCDR2 | AASSLQS |
| SEQ ID NO: 570 (Kabat) | LCDR3 | QQAIALPPFT |
| SEQ ID NO: 571 (Chothia) | LCDR1 | SQGISRW |
| SEQ ID NO: 377 (Chothia) | LCDR2 | AAS |
| SEQ ID NO: 572 (Chothia) | LCDR3 | AIALPPF |
| SEQ ID NO: 573 (IMGT) | LCDR1 | QGISRW |
| SEQ ID NO: 377 (IMGT) | LCDR2 | AAS |
| SEQ ID NO: 570 (IMGT) | LCDR3 | QQAIALPPFT |
| SEQ ID NO: 569 | LCDR1 | RASQGISRWLA |
| (Alternative) | | |
| SEQ ID NO: 374 | LCDR2 | AASSLQS |
| (Alternative) | | |
| SEQ ID NO: 570 | LCDR3 | QQAIALPPFT |
| (Alternative) | | |
| SEQ ID NO: 574 | VL | DIQMTQSPSSVSASVGDRVTITCRASQGISRWLAWYQ |
| | | QKPGKAPKLLIYAASSLQSGVPSRFSGSGSGTDFTLT |
| | | ISSLQPEDFATYYCQQAIALPPFTFGGGTKVEIK |
| 893 | | |
| SEQ ID NO: 575 | HCDR1 | GFTFSSYWMS |
| (Combined) | | |
| SEQ ID NO: 576 | HCDR2 | NIKQDGSEKYYVDSVKG |
| (Combined) | | |
| SEQ ID NO: 577 | HCDR3 | APEYYSTTTRLYYYYGMDV |
| (Combined) | | |
| SEQ ID NO: 578 (Kabat) | HCDR1 | SYWMS |
| SEQ ID NO: 576 (Kabat) | HCDR2 | NIKQDGSEKYYVDSVKG |
| SEQ ID NO: 577 (Kabat) | HCDR3 | APEYYSTTTRLYYYYGMDV |
| SEQ ID NO: 512 (Chothia) | HCDR1 | GFTFSSY |
| SEQ ID NO: 579 (Chothia) | HCDR2 | KQDGSE |
| SEQ ID NO: 577 (Chothia) | HCDR3 | APEYYSTTTRLYYYYGMDV |
| SEQ ID NO: 580 (IMGT) | HCDR1 | GFTFSSYW |
| SEQ ID NO: 581 (IMGT) | HCDR2 | IKQDGSEK |
| SEQ ID NO: 582 (IMGT) | HCDR3 | ARAPEYYSTTTRLYYYYGMDV |
| SEQ ID NO: 583 | HCDR1 | FTFSSYWMS |
| (Alternative) | | |
| SEQ ID NO: 576 | HCDR2 | NIKQDGSEKYYVDSVKG |
| (Alternative) | | |
| SEQ ID NO: 582 | HCDR3 | ARAPEYYSTTTRLYYYYGMDV |
| (Alternative) | | |
| SEQ ID NO: 584 | VH | |
| | | EVQLVESGGGLVQPGGSLRLSCAASGFTFSSYWMSWV |
| | | RQAPGKGLEWVANIKQDGSEKYYVDSVKGRFTISRDN |
| | | AKNSLYLQMNSLRAEDTAVYYCARAPEYYSTTTRLYY |
| | | YYGMDVWGQGTTVTVSS |
| SEQ ID NO: 585 | LCDR1 | KSSQSVLYSSNNKNYLA |
| (Combined) | | |
| SEQ ID NO: 586 | LCDR2 | WASTRES |
| (Combined) | | |
| SEQ ID NO: 587 | LCDR3 | QQYDAHPFT |
| (Combined) | | |
| SEQ ID NO: 585 (Kabat) | LCDR1 | KSSQSVLYSSNNKNYLA |
| SEQ ID NO: 586 (Kabat) | LCDR2 | WASTRES |
| SEQ ID NO: 587 (Kabat) | LCDR3 | QQYDAHPFT |
| SEQ ID NO: 588 (Chothia) | LCDR1 | SQSVLYSSNNKNY |
| SEQ ID NO: 589 (Chothia) | LCDR2 | WAS |
| SEQ ID NO: 590 (Chothia) | LCDR3 | YDAHPF |
| SEQ ID NO: 591 (IMGT) | LCDR1 | QSVLYSSNNKNY |
| SEQ ID NO: 589 (IMGT) | LCDR2 | WAS |
| SEQ ID NO: 587 (IMGT) | LCDR3 | QQYDAHPFT |
| SEQ ID NO: 585 | LCDR1 | KSSQSVLYSSNNKNYLA |
| (Alternative) | | |
| SEQ ID NO: 586 | LCDR2 | WASTRES |
| (Alternative) | | |
| SEQ ID NO: 587 | LCDR3 | QQYDAHPFT |
| (Alternative) | | |
| SEQ ID NO: 592 | VL | DIVMTQSPDSLAVSLGERATINCKSSQSVLYSSNNKN |
| | | YLAWYQQKPGQPPKLLIYWASTRESGVPDRFSGSGSG |
| | | TDFTLTISSLQAEDVAVYYCQQYDAHPFTFGGGTKVE |
| | | IK |
| 939 | | |
| SEQ ID NO: 593 | HCDR1 | GGTFSSYAIS |
| (Combined) | | |
| SEQ ID NO: 594 | HCDR2 | GIIPIFGTANYAQKFQG |
| (Combined) | | |
| SEQ ID NO: 595 | HCDR3 | HYYDYWSGYYTNTGIY |
| (Combined) | | |
| SEQ ID NO: 596 (Kabat) | HCDR1 | SYAIS |
| SEQ ID NO: 594 (Kabat) | HCDR2 | GIIPIFGTANYAQKFQG |
| SEQ ID NO: 595 (Kabat) | HCDR3 | HYYDYWSGYYTNTGIY |
| SEQ ID NO: 597 (Chothia) | HCDR1 | GGTFS SY |
| SEQ ID NO: 598 (Chothia) | HCDR2 | IPIFGT |
| SEQ ID NO: 595 (Chothia) | HCDR3 | HYYDYWSGYYTNTGIY |
| SEQ ID NO: 599 (IMGT) | HCDR1 | GGTFSSYA |
| SEQ ID NO: 600 (IMGT) | HCDR2 | IIPIFGTA |
| SEQ ID NO: 601 (IMGT) | HCDR3 | ARHYYDYWSGYYTNTGIY |
| SEQ ID NO: 602 | HCDR1 | GTFSSYAIS |
| (Alternative) | | |
| SEQ ID NO: 594 | HCDR2 | GIIPIFGTANYAQKFQG |
| (Alternative) | | |
| SEQ ID NO: 601 | HCDR3 | ARHYYDYWSGYYTNTGIY |
| (Alternative) | | |
| SEQ ID NO: 603 | VH | QVQLVQSGAEVKKPGSSVKVSCKASGGTFSSYAISWV |
| | | RQAPGQGLEWMGGIIPIFGTANYAQKFQGRVTITADE |
| | | STSTAYMELSSLRSEDTAVYYCARHYYDYWSGYYTNT |
| | | GIYWGQGTLVTVSS |
| SEQ ID NO: 604 | LCDR1 | RASQSVSSNLA |
| (Combined) | | |
| SEQ ID NO: 408 | LCDR2 | GASTRAT |
| (Combined) | | |
| SEQ ID NO: 605 | LCDR3 | QQSGALPIT |
| (Combined) | | |
| SEQ ID NO: 604 (Kabat) | LCDR1 | RASQSVSSNLA |
| SEQ ID NO: 408 (Kabat) | LCDR2 | GASTRAT |
| SEQ ID NO: 605 (Kabat) | LCDR3 | QQSGALPIT |
| SEQ ID NO: 606 (Chothia) | LCDR1 | SQSVSSN |
| SEQ ID NO: 411 (Chothia) | LCDR2 | GAS |
| SEQ ID NO: 607 (Chothia) | LCDR3 | SGALPI |
| SEQ ID NO: 608 (IMGT) | LCDR1 | QSVSSN |
| SEQ ID NO: 411 (IMGT) | LCDR2 | GAS |
| SEQ ID NO: 605 (IMGT) | LCDR3 | QQSGALPIT |
| SEQ ID NO: 604 | LCDR1 | RASQSVSSNLA |
| (Alternative) | | |
| SEQ ID NO: 408 | LCDR2 | GASTRAT |
| (Alternative) | | |
| SEQ ID NO: 605 | LCDR3 | QQSGALPIT |
| (Alternative) | | |
| SEQ ID NO: 609 | VL | EIVMTQSPATLSVSPGERATLSCRASQSVSSNLAWYQ |
| | | QKPGQAPRLLIYGASTRATGIPARFSGSGSGTEFTLT |
| | | ISSLQSEDFAVYYCQQSGALPITFGGGTKVEIK |
| 430 | | |
| SEQ ID NO: 610 | HCDR1 | GGSFLRYYWS |
| (Combined) | | |
| SEQ ID NO: 611 | HCDR2 | EIDHSGSTNYNPSLKS |
| (Combined) | | |
| SEQ ID NO: 612 | HCDR3 | GQNYYGSGSADGFDP |
| (Combined) | | |
| SEQ ID NO: 420 (Kabat) | HCDR1 | RYYWS |
| SEQ ID NO: 611 (Kabat) | HCDR2 | EIDHSGSTNYNPSLKS |
| SEQ ID NO: 612 (Kabat) | HCDR3 | GQNYYGSGSADGFDP |
| SEQ ID NO: 613 (Chothia) | HCDR1 | GGSFLRY |
| SEQ ID NO: 614 (Chothia) | HCDR2 | DHSGS |
| SEQ ID NO: 612 (Chothia) | HCDR3 | GQNYYGSGSADGFDP |
| SEQ ID NO: 615 (IMGT) | HCDR1 | GGSFLRYY |
| SEQ ID NO: 616 (IMGT) | HCDR2 | IDHSGST |
| SEQ ID NO: 617 (IMGT) | HCDR3 | ARGQNYYGSGSADGFDP |
| SEQ ID NO: 618 | HCDR1 | GSFLRYYWS |
| (Alternative) | | |
| SEQ ID NO: 611 | HCDR2 | EIDHSGSTNYNPSLKS |
| (Alternative) | | |
| SEQ ID NO: 617 | HCDR3 | ARGQNYYGSGSADGFDP |
| (Alternative) | | |
| SEQ ID NO: 619 | VH | QVQLQQWGAGLLKPSETLSLTCAVYGGSFLRYYWSWI |
| | | RQPPGKGLEWIGEIDHSGSTNYNPSLKSRVTISVDTS |
| | | KNQFSLKLSSVTAADTAVYYCARGQNYYGSGSADGFD |
| | | PWGQGTLVTVSS |
| SEQ ID NO: 373 | LCDR1 | RASQGISSWLA |
| (Combined) | | |
| SEQ ID NO: 374 | LCDR2 | AASSLQS |
| (Combined) | | |
| SEQ ID NO: 620 | LCDR3 | QQANSFPPT |
| (Combined) | | |
| SEQ ID NO: 373 (Kabat) | LCDR1 | RASQGISSWLA |
| SEQ ID NO: 374 (Kabat) | LCDR2 | AASSLQS |
| SEQ ID NO: 620 (Kabat) | LCDR3 | QQANSFPPT |
| SEQ ID NO: 376 (Chothia) | LCDR1 | SQGISSW |
| SEQ ID NO: 377 (Chothia) | LCDR2 | AAS |
| SEQ ID NO: 621 (Chothia) | LCDR3 | ANSFPP |
| SEQ ID NO: 379 (IMGT) | LCDR1 | QGISSW |
| SEQ ID NO: 377 (IMGT) | LCDR2 | AAS |
| SEQ ID NO: 620 (IMGT) | LCDR3 | QQANSFPPT |
| SEQ ID NO: 373 | LCDR1 | RASQGISSWLA |
| (Alternative) | | |
| SEQ ID NO: 374 | LCDR2 | AASSLQS |
| (Alternative) | | |
| SEQ ID NO: 620 | LCDR3 | QQANSFPPT |
| (Alternative) | | |
| SEQ ID NO: 622 | VL | DIQMTQSPSSVSASVGDRVTITCRASQGISSWLAWYQ |
| | | QKPGKAPKLLIYAASSLQSGVPSRFSGSGSGTDFTLT |
| | | ISSLQPEDFATYYCQQANSFPPTFGGGTKVEIK |
| 398 | | |
| SEQ ID NO: 623 | HCDR1 | GGSFSGYYWS |
| (Combined) | | |
| SEQ ID NO: 624 | HCDR2 | EIDASGSTRYNPSLKS |
| (Combined) | | |
| SEQ ID NO: 625 | HCDR3 | PLYDAYLDV |
| (Combined) | | |
| SEQ ID NO: 626 (Kabat) | HCDR1 | GYYWS |
| SEQ ID NO: 624 (Kabat) | HCDR2 | EIDASGSTRYNPSLKS |
| SEQ ID NO: 625 (Kabat) | HCDR3 | PLYDAYLDV |
| SEQ ID NO: 627 (Chothia) | HCDR1 | GGSFSGY |
| SEQ ID NO: 628 (Chothia) | HCDR2 | DASGS |
| SEQ ID NO: 625 (Chothia) | HCDR3 | PLYDAYLDV |
| SEQ ID NO: 629 (IMGT) | HCDR1 | GGSFSGYY |
| SEQ ID NO: 630 (IMGT) | HCDR2 | IDASGST |
| SEQ ID NO: 631 (IMGT) | HCDR3 | ARPLYDAYLDV |
| SEQ ID NO: 632 | HCDR1 | GSFSGYYWS |
| (Alternative) | | |
| SEQ ID NO: 624 | HCDR2 | EIDASGSTRYNPSLKS |
| (Alternative) | | |
| SEQ ID NO: 631 | HCDR3 | ARPLYDAYLDV |
| (Alternative) | | |
| SEQ ID NO: 633 | VH | QVQLQQWGAGLLKPSETLSLTCAVYGGSFSGYYWSWI |
| | | RQPPGKGLEWIGEIDASGSTRYNPSLKSRVTISVDTS |
| | | KNQFSLKLSSVTAADTAVYYCARPLYDAYLDVWGQGT |
| | | MVTVSS |
| SEQ ID NO: 373 | LCDR1 | RASQGISSWLA |
| (Combined) | | |
| SEQ ID NO: 374 | LCDR2 | AASSLQS |
| (Combined) | | |
| SEQ ID NO: 634 | LCDR3 | QQAPIYPIT |
| (Combined) | | |
| SEQ ID NO: 373 (Kabat) | LCDR1 | RASQGISSWLA |
| SEQ ID NO: 374 (Kabat) | LCDR2 | AASSLQS |
| SEQ ID NO: 634 (Kabat) | LCDR3 | QQAPIYPIT |
| SEQ ID NO: 376 (Chothia) | LCDR1 | SQGISSW |
| SEQ ID NO: 377 (Chothia) | LCDR2 | AAS |
| SEQ ID NO: 635 (Chothia) | LCDR3 | APIYPI |
| SEQ ID NO: 379 (IMGT) | LCDR1 | QGISSW |
| SEQ ID NO: 377 (IMGT) | LCDR2 | AAS |
| SEQ ID NO: 634 (IMGT) | LCDR3 | QQAPIYPIT |
| SEQ ID NO: 373 | LCDR1 | RASQGISSWLA |
| (Alternative) | | |
| SEQ ID NO: 374 | LCDR2 | AASSLQS |
| (Alternative) | | |
| SEQ ID NO: 634 | LCDR3 | QQAPIYPIT |
| (Alternative) | | |
| SEQ ID NO: 636 | VL | DIQMTQSPSSVSASVGDRVTITCRASQGISSWLAWYQ |
| | | QKPGKAPKLLIYAASSLQSGVPSRFSGSGSGTDFTLT |
| | | ISSLQPEDFATYYCQQAPIYPITFGGGTKVEIK |

TABLE 3
Consensus CDR sequences for exemplary anti-CD73 antibodies
Lineage 3

| | | |
|---|---|---|
| SEQ ID NO: 485 | HCDR1 | GFTFX₁X₂X₃AMS, wherein |
| (Combined) | | X₁ is H, S, R, or K; |
| | | X₂ is R, Y, or S; and |
| | | X₃ is Y or N |
| SEQ ID NO: 448 | HCDR2 | X₁IX₂GX₃GX₄X₅TYYADSVKG, wherein |
| (Combined) | | X₁ is A or S; |
| | | X₂ is S or T; |
| | | X₃ is S or T; |
| | | X₄ is M, G, or S; and |
| | | X₅ is N, S, L, or Y |
| SEQ ID NO: 396 | HCDR3 | GGLYGSGSYLSDFDL |
| (Combined) | | |
| SEQ ID NO: 407 | LCDR1 | RASQSVGSNLA |
| (Combined) | | |
| SEQ ID NO: 408 | LCDR2 | GASTRAT |
| (Combined) | | |
| SEQ ID NO: 409 | LCDR3 | QQHNAFPYT |
| (Combined) | | |
| SEQ ID NO: 447 (Kabat) | HCDR1 | X₁X₂AMS, wherein |
| | | X₁ is R, Y, or S; and |
| | | X₂ is Y or N |
| SEQ ID NO: 448 (Kabat) | HCDR2 | X₁IX₂GX₃GX₄X₅TYYADSVKG, wherein |
| | | X₁ is A or S; |
| | | X₂ is S or T; |
| | | X₃ is S or T; |
| | | X₄ is M, G, or S; and |
| | | X₅ is N, S, L, or Y |
| SEQ ID NO: 396 (Kabat) | HCDR3 | GGLYGSGSYLSDFDL |
| SEQ ID NO: 407 (Kabat) | LCDR1 | RASQSVGSNLA |
| SEQ ID NO: 408 (Kabat) | LCDR2 | GASTRAT |
| SEQ ID NO: 409 (Kabat) | LCDR3 | QQHNAFPYT |
| SEQ ID NO: 481 (Chothia) | HCDR1 | GFTFX₁X₂X₃, wherein |
| | | X₁ is H, S, R, or K; |
| | | X₂ is R, Y, or S; and |
| | | X₃ is Y or N |
| SEQ ID NO: 482 (Chothia) | HCDR2 | X₁GX₂GX₃X₄, wherein |
| | | X₁ is S or T; |
| | | X₂ is S or T; |
| | | X₃ is M, G, or S; and |
| | | X₄ is N, S, L, or Y |
| SEQ ID NO: 396 (Chothia) | HCDR3 | GGLYGSGSYLSDFDL |
| SEQ ID NO: 410 (Chothia) | LCDR1 | SQSVGSN |
| SEQ ID NO: 411 (Chothia) | LCDR2 | GAS |
| SEQ ID NO: 412 (Chothia) | LCDR3 | HNAFPY |
| SEQ ID NO: 487 (IMGT) | HCDR1 | GFTFX₁X₂X₃A, wherein |
| | | X₁ is H, S, R, or K; |
| | | X₂ is R, Y, or S; and |
| | | X₃ is Y or N |
| SEQ ID NO: 488 (IMGT) | HCDR2 | IX₁GX₂GX₃X₄T, wherein |
| | | X₁ is S or T; |
| | | X₂ is S or T; |
| | | X₃ is M, G, or S; and |
| | | X₄ is N, S, L, or Y |
| SEQ ID NO: 402 (IMGT) | HCDR3 | ARGGLYGSGSYLSDFDL |
| SEQ ID NO: 413 (IMGT) | LCDR1 | QSVGSN |
| SEQ ID NO: 411 (IMGT) | LCDR2 | GAS |
| SEQ ID NO: 409 (IMGT) | LCDR3 | QQHNAFPYT |
| SEQ ID NO: 529 | HCDR1 | FTFX₁X₂X₃AMS, wherein |
| (Alternative) | | X₁ is H, S, R, or K; |
| | | X₂ is R, Y, or S; and |
| | | X₃ is Y or N |
| SEQ ID NO: 448 | HCDR2 | X₁IX₂GX₃GX₄X₅TYYADSVKG, wherein |
| (Alternative) | | X₁ is A or S; |
| | | X₂ is S or T; |
| | | X₃ is S or T; |
| | | X₄ is M, G, or S; and |
| | | X₅ is N, S, L, or Y |
| SEQ ID NO: 402 | HCDR3 | ARGGLYGSGSYLSDFDL |
| (Alternative) | | |
| SEQ ID NO: 407 | LCDR1 | RASQSVGSNLA |
| (Alternative) | | |
| SEQ ID NO: 408 | LCDR2 | GASTRAT |
| (Alternative) | | |
| SEQ ID NO: 409 | LCDR3 | QQHNAFPYT |
| (Alternative) | | |

Lineage 1

| | | |
|---|---|---|
| SEQ ID NO: 486 | HCDR1 | GGSIX₁X₂X₃YWS, wherein |
| (Combined) | | X₁ is E or S; |
| | | X₂ is R, G, or S; and |
| | | X₃ is Y or R |
| SEQ ID NO: 450 | HCDR2 | YIYX₁X₂GSTX₃YNPSLKS, wherein |
| (Combined) | | X₁ is G or S; |
| | | X₂ is R, S, or T; and |
| | | X₃ is N or K |
| SEQ ID NO: 362 | HCDR3 | ESQESPYNNWFDP |
| (Combined) | | |
| SEQ ID NO: 373 | LCDR1 | RASQGISSWLA |
| (Combined) | | |
| SEQ ID NO: 374 | LCDR2 | AASSLQS |
| (Combined) | | |
| SEQ ID NO: 375 | LCDR3 | QQGNSFPRT |
| (Combined) | | |
| SEQ ID NO: 449 (Kabat) | HCDR1 | X₁X₂YWS, wherein |
| | | X₁ is R, G, or S; and |
| | | X₂ is Y or R |
| SEQ ID NO: 450 (Kabat) | HCDR2 | YIYX₁X₂GSTX₃YNPSLKS, wherein |
| | | X₁ is G or S; |
| | | X₂ is R, S, or T; and |
| | | X₃ is N or K |
| SEQ ID NO: 362 (Kabat) | HCDR3 | ESQESPYNNWFDP |
| SEQ ID NO: 373 (Kabat) | LCDR1 | RASQGISSWLA |
| SEQ ID NO: 374 (Kabat) | LCDR2 | AASSLQS |
| SEQ ID NO: 375 (Kabat) | LCDR3 | QQGNSFPRT |
| SEQ ID NO: 483 (Chothia) | HCDR1 | GGSIX₁X₂X₃, wherein |
| | | X₁ is E or S; |
| | | X₂ is R, G, or S; and |
| | | X₃ is Y or R |
| SEQ ID NO: 484 (Chothia) | HCDR2 | YX₁X₂GS, wherein |
| | | X₁ is G or S; and |
| | | X₂ is R, S, or T |
| SEQ ID NO: 362 (Chothia) | HCDR3 | ESQESPYNNWFDP |
| SEQ ID NO: 376 (Chothia) | LCDR1 | SQGISSW |
| SEQ ID NO: 377 (Chothia) | LCDR2 | AAS |
| SEQ ID NO: 378 (Chothia) | LCDR3 | GNSFPR |
| SEQ ID NO: 489 (IMGT) | HCDR1 | GGSIX₁X₂X₃Y, wherein |
| | | X₁ is E or S; |
| | | X₂ is R, G, or S; and |
| | | X₃ is Y or R |
| SEQ ID NO: 490 (IMGT) | HCDR2 | IYX₁X₂GST, wherein |
| | | X₁ is G or S; and |
| | | X₂ is R, S, or T |
| SEQ ID NO: 368 (IMGT) | HCDR3 | ARESQESPYNNWFDP |
| SEQ ID NO: 379 (IMGT) | LCDR1 | QGISSW |
| SEQ ID NO: 377 (IMGT) | LCDR2 | AAS |
| SEQ ID NO: 375 (IMGT) | LCDR3 | QQGNSFPRT |
| SEQ ID NO: 536 | HCDR1 | GSIX₁X₂X₃YWS, wherein |
| (Alternative) | | X₁ is E or S; |
| | | X₂ is R, G, or S; and |
| | | X₃ is Y or R |
| SEQ ID NO: 450 | HCDR2 | YIYX₁X₂GSTX₃YNPSLKS, wherein |
| (Alternative) | | X₁ is G or S; |
| | | X₂ is R, S, or T; and |
| | | X₃ is N or K |
| SEQ ID NO: 368 | HCDR3 | ARESQESPYNNWFDP |
| (Alternative) | | |
| SEQ ID NO: 373 | LCDR1 | RASQGISSWLA |
| (Alternative) | | |
| SEQ ID NO: 374 | LCDR2 | AASSLQS |
| (Alternative) | | |
| SEQ ID NO: 375 | LCDR3 | QQGNSFPRT |
| (Alternative) | | |

TABLE 4
Corresponding germline sequences of anti-CD73 antibodies

| Antibody | VH germline | VL germline |
|---|---|---|
| 918 | VH4-59 | VK1-12 |
| 350 | VH4-59 | VK1-12 |
| 356 | VH4-59 | VK1-12 |
| 358 | VH4-59 | VK1-12 |
| 930 | VH3-23 | VK3-15 |
| 373 | VH3-23 | VK3-15 |
| 374 | VH3-23 | VK3-15 |
| 376 | VH3-23 | VK3-15 |
| 377 | VH3-23 | VK3-15 |
| 379 | VH3-23 | VK3-15 |
| 363 | VH3-23 | VK1-05 |
| 366 | VH3-23 | VK1-05 |
| 407 | VH1-02 | VK1-12 |
| 893 | VH3-07 | VK4-01 |
| 939 | VH1-69 | VK3-15 |
| 430 | VH4-34 | VK1-12 |
| 398 | VH4-34 | VK1-12 |

TABLE 5
Constant region amino acid sequences of human I2G heavy chains and human kappa
light chain

| SEQ | | |
|---|---|---|
| ID NO | Description | Sequence |
| 451 | IgG4 (S228P) | ASTKGPSVFPLAPCSRSTSESTAALGCLVKDYFPEPVTVSWNSGALTS |
| | | GVHTFPAVLQSSGLYSLSSVVTVPSSSLGTKTYTCNVDHKPSNTKVD |
| | | KRVESKYGPPCPPCPAPEFLGGPSVFLFPPKPKDTLMISRTPEVTCVVV |
| | | DVSQEDPEVQFNWYVDGVEVHNAKTKPREEQFNSTYRVVSVLTVLH |
| | | QDWLNGKEYKCKVSNKGLPSSIEKTISKAKGQPREPQVYTLPPSQEE |
| | | MTKNQVSLTCLVKGFYPSDIAVEWESNGQPENNYKTTPPVLDSDGSF |
| | | FLYSRLTVDKSRWQEGNVFSCSVMHEALHNHYTQKSLSLSLGK |
| 452 | IgG4 (S228P) | ASTKGPSVFPLAPCSRSTSESTAALGCLVKDYFPEPVTVSWNSGALTS |
| | lacking C- | GVHTFPAVLQSSGLYSLSSVVTVPSSSLGTKTYTCNVDHKPSNTKVD |
| | terminal lysine | KRVESKYGPPCPPCPAPEFLGGPSVFLFPPKPKDTLMISRTPEVTCVVV |
| | | DVSQEDPEVQFNWYVDGVEVHNAKTKPREEQFNSTYRVVSVLTVLH |
| | | QDWLNGKEYKCKVSNKGLPSSIEKTISKAKGQPREPQVYTLPPSQEE |
| | | MTKNQVSLTCLVKGFYPSDIAVEWESNGQPENNYKTTPPVLDSDGSF |
| | | FLYSRLTVDKSRWQEGNVFSCSVMHEALHNHYTQKSLSLSLG |
| 453 | IgG4 | ASTKGPSVFPLAPCSRSTSESTAALGCLVKDYFPEPVTVSWNSGALTS |
| | (S228P/L235E) | GVHTFPAVLQSSGLYSLSSVVTVPSSSLGTKTYTCNVDHKPSNTKVD |
| | | KRVESKYGPPCPPCPAPEFEGGPSVFLFPPKPKDTLMISRTPEVTCVVV |
| | | DVSQEDPEVQFNWYVDGVEVHNAKTKPREEQFNSTYRVVSVLTVLH |
| | | QDWLNGKEYKCKVSNKGLPSSIEKTISKAKGQPREPQVYTLPPSQEE |
| | | MTKNQVSLTCLVKGFYPSDIAVEWESNGQPENNYKTTPPVLDSDGSF |
| | | FLYSRLTVDKSRWQEGNVFSCSVMHEALHNHYTQKSLSLSLGK |
| 454 | IgG4 | ASTKGPSVFPLAPCSRSTSESTAALGCLVKDYFPEPVTVSWNSGALTS |
| | (S228P/L235E) | GVHTFPAVLQSSGLYSLSSVVTVPSSSLGTKTYTCNVDHKPSNTKVD |
| | lacking C- | KRVESKYGPPCPPCPAPEFEGGPSVFLFPPKPKDTLMISRTPEVTCVVV |
| | terminal lysine | DVSQEDPEVQFNWYVDGVEVHNAKTKPREEQFNSTYRVVSVLTVLH |
| | | QDWLNGKEYKCKVSNKGLPSSIEKTISKAKGQPREPQVYTLPPSQEE |
| | | MTKNQVSLTCLVKGFYPSDIAVEWESNGQPENNYKTTPPVLDSDGSF |
| | | FLYSRLTVDKSRWQEGNVFSCSVMHEALHNHYTQKSLSLSLG |
| 478 | IgG1 wild type | ASTKGPSVFPLAPSSKSTSGGTAALGCLVKDYFPEPVTVSWNSGALTS |
| | | GVHTFPAVLQSSGLYSLSSVVTVPSSSLGTQTYICNVNHKPSNTKVDK |
| | | KVEPKSCDKTHTCPPCPAPELLGGPSVFLFPPKPKDTLMISRTPEVTCV |
| | | VVDVSHEDPEVKFNWYVDGVEVHNAKTKPREEQYNSTYRVVSVLT |
| | | VLHQDWLNGKEYKCKVSNKALPAPIEKTISKAKGQPREPQVYTLPPS |
| | | RDELTKNQVSLTCLVKGFYPSDIAVEWESNGQPENNYKTTPPVLDSD |
| | | GSFFLYSKLTVDKSRWQQGNVFSCSVMHEALHNHYTQKSLSLSPGK |
| 479 | IgG1 wild type | ASTKGPSVFPLAPSSKSTSGGTAALGCLVKDYFPEPVTVSWNSGALTS |
| | lacking C- | GVHTFPAVLQSSGLYSLSSVVTVPSSSLGTQTYICNVNHKPSNTKVDK |
| | terminal lysine | KVEPKSCDKTHTCPPCPAPELLGGPSVFLFPPKPKDTLMISRTPEVTCV |
| | | VVDVSHEDPEVKFNWYVDGVEVHNAKTKPREEQYNSTYRVVSVLT |
| | | VLHQDWLNGKEYKCKVSNKALPAPIEKTISKAKGQPREPQVYTLPPS |
| | | RDELTKNQVSLTCLVKGFYPSDIAVEWESNGQPENNYKTTPPVLDSD |
| | | GSFFLYSKLTVDKSRWQQGNVFSCSVMHEALHNHYTQKSLSLSPG |
| 455 | IgG1 wild type | ASTKGPSVFPLAPSSKSTSGGTAALGCLVKDYFPEPVTVSWNSGALTS |
| | | GVHTFPAVLQSSGLYSLSSVVTVPSSSLGTQTYICNVNHKPSNTKVDK |
| | | RVEPKSCDKTHTCPPCPAPELLGGPSVFLFPPKPKDTLMISRTPEVTCV |
| | | VVDVSHEDPEVKFNWYVDGVEVHNAKTKPREEQYNSTYRVVSVLT |
| | | VLHQDWLNGKEYKCKVSNKALPAPIEKTISKAKGQPREPQVYTLPPS |
| | | REEMTKNQVSLTCLVKGFYPSDIAVEWESNGQPENNYKTTPPVLDSD |
| | | GSFFLYSKLTVDKSRWQQGNVFSCSVMHEALHNHYTQKSLSLSPGK |
| 456 | IgG1 wild type | ASTKGPSVFPLAPSSKSTSGGTAALGCLVKDYFPEPVTVSWNSGALTS |
| | lacking C- | GVHTFPAVLQSSGLYSLSSVVTVPSSSLGTQTYICNVNHKPSNTKVDK |
| | terminal lysine | RVEPKSCDKTHTCPPCPAPELLGGPSVFLFPPKPKDTLMISRTPEVTCV |
| | | VVDVSHEDPEVKFNWYVDGVEVHNAKTKPREEQYNSTYRVVSVLT |
| | | VLHQDWLNGKEYKCKVSNKALPAPIEKTISKAKGQPREPQVYTLPPS |
| | | REEMTKNQVSLTCLVKGFYPSDIAVEWESNGQPENNYKTTPPVLDSD |
| | | GSFFLYSKLTVDKSRWQQGNVFSCSVMHEALHNHYTQKSLSLSPG |
| 457 | IgG1 (N297A) | ASTKGPSVFPLAPSSKSTSGGTAALGCLVKDYFPEPVTVSWNSGALTS |
| | | GVHTFPAVLQSSGLYSLSSVVTVPSSSLGTQTYICNVNHKPSNTKVDK |
| | | RVEPKSCDKTHTCPPCPAPELLGGPSVFLFPPKPKDTLMISRTPEVTCV |
| | | VVDVSHEDPEVKFNWYVDGVEVHNAKTKPREEQYASTYRVVSVLT |
| | | VLHQDWLNGKEYKCKVSNKALPAPIEKTISKAKGQPREPQVYTLPPS |
| | | REEMTKNQVSLTCLVKGFYPSDIAVEWESNGQPENNYKTTPPVLDSD |
| | | GSFFLYSKLTVDKSRWQQGNVFSCSVMHEALHNHYTQKSLSLSPGK |
| 458 | IgG1 (N297A) | ASTKGPSVFPLAPSSKSTSGGTAALGCLVKDYFPEPVTVSWNSGALTS |
| | lacking C- | GVHTFPAVLQSSGLYSLSSVVTVPSSSLGTQTYICNVNHKPSNTKVDK |
| | terminal lysine | RVEPKSCDKTHTCPPCPAPELLGGPSVFLFPPKPKDTLMISRTPEVTCV |
| | | VVDVSHEDPEVKFNWYVDGVEVHNAKTKPREEQYASTYRVVSVLT |
| | | VLHQDWLNGKEYKCKVSNKALPAPIEKTISKAKGQPREPQVYTLPPS |
| | | REEMTKNQVSLTCLVKGFYPSDIAVEWESNGQPENNYKTTPPVLDSD |
| | | GSFFLYSKLTVDKSRWQQGNVFSCSVMHEALHNHYTQKSLSLSPG |
| 459 | IgG1 | ASTKGPSVFPLAPSSKSTSGGTAALGCLVKDYFPEPVTVSWNSGALTS |
| | (D265A/P329A) | GVHTFPAVLQSSGLYSLSSVVTVPSSSLGTQTYICNVNHKPSNTKVDK |
| | | RVEPKSCDKTHTCPPCPAPELLGGPSVFLFPPKPKDTLMISRTPEVTCV |
| | | VVAVSHEDPEVKFNWYVDGVEVHNAKTKPREEQYNSTYRVVSVLT |
| | | VLHQDWLNGKEYKCKVSNKALAAPIEKTISKAKGQPREPQVYTLPPS |
| | | REEMTKNQVSLTCLVKGFYPSDIAVEWESNGQPENNYKTTPPVLDSD |
| | | GSFFLYSKLTVDKSRWQQGNVFSCSVMHEALHNHYTQKSLSLSPGK |
| 460 | IgG1 | ASTKGPSVFPLAPSSKSTSGGTAALGCLVKDYFPEPVTVSWNSGALTS |
| | (D265A/P329A) | GVHTFPAVLQSSGLYSLSSVVTVPSSSLGTQTYICNVNHKPSNTKVDK |
| | lacking C- | RVEPKSCDKTHTCPPCPAPELLGGPSVFLFPPKPKDTLMISRTPEVTCV |
| | terminal lysine | VVAVSHEDPEVKFNWYVDGVEVHNAKTKPREEQYNSTYRVVSVLT |
| | | VLHQDWLNGKEYKCKVSNKALAAPIEKTISKAKGQPREPQVYTLPPS |
| | | REEMTKNQVSLTCLVKGFYPSDIAVEWESNGQPENNYKTTPPVLDSD |
| | | GSFFLYSKLTVDKSRWQQGNVFSCSVMHEALHNHYTQKSLSLSPG |
| 461 | IgG1 | ASTKGPSVFPLAPSSKSTSGGTAALGCLVKDYFPEPVTVSWNSGALTS |
| | (L234A/L235A) | GVHTFPAVLQSSGLYSLSSVVTVPSSSLGTQTYICNVNHKPSNTKVDK |
| | | RVEPKSCDKTHTCPPCPAPEAAGGPSVFLFPPKPKDTLMISRTPEVTCV |
| | | VVDVSHEDPEVKFNWYVDGVEVHNAKTKPREEQYNSTYRVVSVLT |
| | | VLHQDWLNGKEYKCKVSNKALPAPIEKTISKAKGQPREPQVYTLPPS |
| | | REEMTKNQVSLTCLVKGFYPSDIAVEWESNGQPENNYKTTPPVLDSD |
| | | GSFFLYSKLTVDKSRWQQGNVFSCSVMHEALHNHYTQKSLSLSPGK |
| 462 | IgG1 | ASTKGPSVFPLAPSSKSTSGGTAALGCLVKDYFPEPVTVSWNSGALTS |
| | (L234A/L235A) | GVHTFPAVLQSSGLYSLSSVVTVPSSSLGTQTYICNVNHKPSNTKVDK |
| | lacking C- | RVEPKSCDKTHTCPPCPAPEAAGGPSVFLFPPKPKDTLMISRTPEVTCV |
| | terminal lysine | VVDVSHEDPEVKFNWYVDGVEVHNAKTKPREEQYNSTYRVVSVLT |
| | | VLHQDWLNGKEYKCKVSNKALPAPIEKTISKAKGQPREPQVYTLPPS |
| | | REEMTKNQVSLTCLVKGFYPSDIAVEWESNGQPENNYKTTPPVLDSD |
| | | GSFFLYSKLTVDKSRWQQGNVFSCSVMHEALHNHYTQKSLSLSPG |
| 463 | Human kappa | RTVAAPSVFIFPPSDEQLKSGTASVVCLLNNFYPREAKVQWKVDNAL |
| | constant region | QSGNSQESVTEQDSKDSTYSLSSTLTLSKADYEKHKVYACEVTHQGL |
| | | SSPVTKSFNRGEC |

TABLE 6
Exemplary sequences of CD73

| SEQ ID | | |
|---|---|---|
| NO | Description | Sequence |
| 464 | Human CD73 | MCPRAARAPATLLLALGAVLWPAAGAWELTILHTNDVHSR |
| | (Q6NZX3) | LEQTSEDSSKCVNASRCMGGVARLFTKVQQIRRAEPNVLLL |
| | | DAGDQYQGTIWFTVYKGAEVAHFMNALRYDAMALGNHEF |
| | | DNGVEGLIEPLLKEAKFPILSANIKAKGPLASQISGLYLPYKV |
| | | LPVGDEVVGIVGYTSKETPFLSNPGTNLVFEDEITALQPEVD |
| | | KLKTLNVNKIIALGHSGFEMDKLIAQKVRGVDVVVGGHSN |
| | | TFLYTGNPPSKEVPAGKYPFIVTSDDGRKVPVVQAYAFGKY |
| | | LGYLKIEFDERGNVISSHGNPILLNSSIPEDPSIKADINKWRIK |
| | | LDNYSTQELGKTIVYLDGSSQSCRFRECNMGNLICDAMINN |
| | | NLRHADETFWNHVSMCILNGGGIRSPIDERNNGTITWENLA |
| | | AVLPFGGTFDLVQLKGSTLKKAFEHSVHRYGQSTGEFLQVG |
| | | GIHVVYDLSRKPGDRVVKLDVLCTKCRVPSYDPLKMDEVY |
| | | KVILPNFLANGGDGFQMIKDELLRHDSGDQDINVVSTYISK |
| | | MKVIYPAVEGRIKFSTGSHCHGSFSLIFLSLWAVIFVLYQ |
| 465 | Human CD73 isoform | MCPRAARAPATLLLALGAVLWPAAGAWELTILHTNDVHSR |
| | (P21589-1) | LEQTSEDSSKCVNASRCMGGVARLFTKVQQIRRAEPNVLLL |
| | | DAGDQYQGTIWFTVYKGAEVAHFMNALRYDAMALGNHEF |
| | | DNGVEGLIEPLLKEAKFPILSANIKAKGPLASQISGLYLPYKV |
| | | LPVGDEVVGIVGYTSKETPFLSNPGTNLVFEDEITALQPEVD |
| | | KLKTLNVNKIIALGHSGFEMDKLIAQKVRGVDVVVGGHSN |
| | | TFLYTGNPPSKEVPAGKYPFIVTSDDGRKVPVVQAYAFGKY |
| | | LGYLKIEFDERGNVISSHGNPILLNSSIPEDPSIKADINKWRIK |
| | | LDNYSTQELGKTIVYLDGSSQSCRFRECNMGNLICDAMINN |
| | | NLRHTDEMFWNHVSMCILNGGGIRSPIDERNNGTITWENLA |
| | | AVLPFGGTFDLVQLKGSTLKKAFEHSVHRYGQSTGEFLQVG |
| | | GIHVVYDLSRKPGDRVVKLDVLCTKCRVPSYDPLKMDEVY |
| | | KVILPNFLANGGDGFQMIKDELLRHDSGDQDINVVSTYISK |
| | | MKVIYPAVEGRIKFSTGSHCHGSFSLIFLSLWAVIFVLYQ |
| 466 | Human CD73 isoform | MCPRAARAPATLLLALGAVLWPAAGAWELTILHTNDVHSR |
| | (P21589-2) | LEQTSEDSSKCVNASRCMGGVARLFTKVQQIRRAEPNVLLL |
| | | DAGDQYQGTIWFTVYKGAEVAHFMNALRYDAMALGNHEF |
| | | DNGVEGLIEPLLKEAKFPILSANIKAKGPLASQISGLYLPYKV |
| | | LPVGDEVVGIVGYTSKETPFLSNPGTNLVFEDEITALQPEVD |
| | | KLKTLNVNKIIALGHSGFEMDKLIAQKVRGVDVVVGGHSN |
| | | TFLYTGNPPSKEVPAGKYPFIVTSDDGRKVPVVQAYAFGKY |
| | | LGYLKIEFDERGNVISSHGNPILLNSSIPEDPSIKADINKWRIK |
| | | LDNYSTQELGKTIVYLDGSSQSCRFRECNMGNLICDAMINN |
| | | NLRHTDEMFWNHVSMCILNGGGIRSPIDERNNGIHVVYDLS |
| | | RKPGDRVVKLDVLCTKCRVPSYDPLKMDEVYKVILPNFLA |
| | | NGGDGFQMIKDELLRHDSGDQDINVVSTYISKMKVIYPAVE |
| | | GRIKFSTGSHCHGSFSLIFLSLWAVIFVLYQ |
| 467 | CD73 fragment (residue | YLPYKVLPVGDEVVG |
| | range 158-172 of SEQ | |
| | ID NO: 464) | |
| 468 | CD73 fragment (residue | KLKTLNVNKI |
| | range 206-215 of SEQ | |
| | ID NO: 464) | |
| 469 | CD73 fragment (residue | MINNNLRHADETFWNHVSMC |
| | range 368-387 of SEQ | |
| | ID NO: 464) | |
| 480 | CD73 fragment (residue | MINNNLRHTDEMFWNHVSMC |
| | range 368-387 of SEQ | |
| | ID NO: 465) | |
| 470 | CD73 fragment (residue | YQGTIWFTVYKGAEVAHF |
| | range 87-104 of SEQ ID | |
| | NO: 464) | |
| 477 | CD73 fragment (residue | RGNVISSHGNPIL |
| | range 297-309 of SEQ | |
| | ID NO: 464) | |
| 491 | CD73 fragment (residue | WELTILHTNDVHSRLEQTSEDSSKCVNASRCMGGVARLFTK |
| | range 27-547 of SEQ ID | VQQIRRAEPNVLLLDAGDQYQGTIWFTVYKGAEVAHFMNA |
| | NO: 464) | LRYDAMALGNHEFDNGVEGLIEPLLKEAKFPILSANIKAKGP |
| | | LASQISGLYLPYKVLPVGDEVVGIVGYTSKETPFLSNPGTNL |
| | | VFEDEITALQPEVDKLKTLNVNKIIALGHSGFEMDKLIAQKV |
| | | RGVDVVVGGHSNTFLYTGNPPSKEVPAGKYPFIVTSDDGRK |
| | | VPVVQAYAFGKYLGYLKIEFDERGNVISSHGNPILLNSSIPED |
| | | PSIKADINKWRIKLDNYSTQELGKTIVYLDGSSQSCRFRECN |
| | | MGNLICDAMINNNLRHADETFWNHVSMCILNGGGIRSPIDE |
| | | RNNGTITWENLAAVLPFGGTFDLVQLKGSTLKKAFEHSVHR |
| | | YGQSTGEFLQVGGIHVVYDLSRKPGDRVVKLDVLCTKCRV |
| | | PSYDPLKMDEVYKVILPNFLANGGDGFQMIKDELLRHDSGD |
| | | QDINVVSTYISKMKVIYPAVEGRIK |
| 528 | CD73 fragment (residue | WELTILHTNDVHSRLEQTSEDSSKCVNASRCMGGVARLFTK |
| | range 27-547 of SEQ ID | VQQIRRAEPNVLLLDAGDQYQGTIWFTVYKGAEVAHFMNA |
| | NO: 464) fused to a C- | LRYDAMALGNHEFDNGVEGLIEPLLKEAKFPILSANIKAKGP |
| | terminal 6-His tag (SEQ | LASQISGLYLPYKVLPVGDEVVGIVGYTSKETPFLSNPGTNL |
| | ID NO: 639) | VFEDEITALQPEVDKLKTLNVNKIIALGHSGFEMDKLIAQKV |
| | | RGVDVVVGGHSNTFLYTGNPPSKEVPAGKYPFIVTSDDGRK |
| | | VPVVQAYAFGKYLGYLKIEFDERGNVISSHGNPILLNSSIPED |
| | | PSIKADINKWRIKLDNYSTQELGKTIVYLDGSSQSCRFRECN |
| | | MGNLICDAMINNNLRHADETFWNHVSMCILNGGGIRSPIDE |
| | | RNNGTITWENLAAVLPFGGTFDLVQLKGSTLKKAFEHSVHR |
| | | YGQSTGEFLQVGGIHVVYDLSRKPGDRVVKLDVLCTKCRV |
| | | PSYDPLKMDEVYKVILPNFLANGGDGFQMIKDELLRHDSGD |
| | | QDINVVSTYISKMKVIYPAVEGRIKHHHHHH |
| 637 | CD73 fragment (residue | MCPRAARAPATLLLALGAVLWPAAGAWELTILHTNDVHSR |
| | range 27-547 of SEQ ID | LEQTSEDSSKCVNASRCMGGVARLFTKVQQIRRAEPNVLLL |
| | NO: 464) fused to a C- | DAGDQYQGTIWFTVYKGAEVAHFMNALRYDAMALGNHEF |
| | terminal 6-His tag (SEQ | DNGVEGLIEPLLKEAKFPILSANIKAKGPLASQISGLYLPYKV |
| | ID NO: 639), including | LPVGDEVVGIVGYTSKETPFLSNPGTNLVFEDEITALQPEVD |
| | a signal peptide | KLKTLNVNKIIALGHSGFEMDKLIAQKVRGVDVVVGGHSN |
| | | TFLYTGNPPSKEVPAGKYPFIVTSDDGRKVPVVQAYAFGKY |
| | | LGYLKIEFDERGNVISSHGNPILLNSSIPEDPSIKADINKWRIK |
| | | LDNYSTQELGKTIVYLDGSSQSCRFRECNMGNLICDAMINN |
| | | NLRHADETFWNHVSMCILNGGGIRSPIDERNNGTITWENLA |
| | | AVLPFGGTFDLVQLKGSTLKKAFEHSVHRYGQSTGEFLQVG |
| | | GIHVVYDLSRKPGDRVVKLDVLCTKCRVPSYDPLKMDEVY |
| | | KVILPNFLANGGDGFQMIKDELLRHDSGDQDINVVSTYISK |
| | | MKVIYPAVEGRIKHHHHHH |

[0971] PD-1 Inhibitors

[0972] In certain embodiments, the combination of the ENTPD2 antibody or antigen binding fragment thereof as described herein and the CD73 antibody or antigen binding fragment thereof as described herein is administered in combination with a PD-1 inhibitor. In some embodiments, the PD-1 inhibitor is chosen from PDR001 (Novartis), Nivolumab (Bristol-Myers Squibb), Pembrolizumab (Merck & Co), Pidilizumab (CureTech), MEDI0680 (Medimmune), REGN2810 (Regeneron), TSR-042 (Tesaro), PF-06801591 (Pfizer), BGB-A317 (Beigene), BGB-108 (Beigene), INCSHR1210 (Incyte), or AMP-224 (Amplimmune).

### Exemplary PD-1 Inhibitors

[0973] In one embodiment, the PD-1 inhibitor is an anti-PD-1 antibody molecule. In one embodiment, the PD-1 inhibitor is an anti-PD-1 antibody molecule as described in US 2015/0210769, published on Jul. 30, 2015, entitled “Antibody Molecules to PD-1 and Uses Thereof,” incorporated by reference in its entirety.

[0974] In one embodiment, the anti-PD-1 antibody molecule comprises at least one, two, three, four, five or six complementarity determining regions (CDRs) (or collectively all of the CDRs) from a heavy and light chain variable region comprising an amino acid sequence shown in Table 7 (e.g., from the heavy and light chain variable region sequences of BAP049-Clone-E or BAP049-Clone-B disclosed in Table 7), or encoded by a nucleotide sequence shown in Table 7. In some embodiments, the CDRs are according to the Kabat definition (e.g., as set out in Table 7). In some embodiments, the CDRs are according to the Chothia definition (e.g., as set out in Table). In some embodiments, the CDRs are according to the combined CDR definitions of both Kabat and Chothia (e.g., as set out in Table 7). In one embodiment, the combination of Kabat and Chothia CDR of VH CDR1 comprises the amino acid sequence GYTFTTYWMH (SEQ ID NO: 638). In one embodiment, one or more of the CDRs (or collectively all of the CDRs) have one, two, three, four, five, six or more changes, e.g., amino acid substitutions (e.g., conservative amino acid substitutions) or deletions, relative to an amino acid sequence shown in Table 7, or encoded by a nucleotide sequence shown in Table 7.

[0975] In one embodiment, the anti-PD-1 antibody molecule comprises a heavy chain variable region (VH) comprising a VHCDR1 amino acid sequence of SEQ ID NO: 295, a VHCDR2 amino acid sequence of SEQ ID NO: 296, and a VHCDR3 amino acid sequence of SEQ ID NO: 297; and a light chain variable region (VL) comprising a VLCDR1 amino acid sequence of SEQ ID NO: 304, a VLCDR2 amino acid sequence of SEQ ID NO: 305, and a VLCDR3 amino acid sequence of SEQ ID NO: 306, each disclosed in Table 7.

[0976] In one embodiment, the antibody molecule comprises a VH comprising a VHCDR1 encoded by the nucleotide sequence of SEQ ID NO: 318, a VHCDR2 encoded by the nucleotide sequence of SEQ ID NO: 319, and a VHCDR3 encoded by the nucleotide sequence of SEQ ID NO: 320; and a VL comprising a VLCDR1 encoded by the nucleotide sequence of SEQ ID NO: 323, a VLCDR2 encoded by the nucleotide sequence of SEQ ID NO: 324, and a VLCDR3 encoded by the nucleotide sequence of SEQ ID NO: 325, each disclosed in Table 7.

[0977] In one embodiment, the anti-PD-1 antibody molecule comprises a VH comprising the amino acid sequence of SEQ ID NO: 300, or an amino acid sequence at least 85%, 90%, 95%, or 99% identical or higher to SEQ ID NO: 300. In one embodiment, the anti-PD-1 antibody molecule comprises a VL comprising the amino acid sequence of SEQ ID NO: 314, or an amino acid sequence at least 85%, 90%, 95%, or 99% identical or higher to SEQ ID NO: 314. In one embodiment, the anti-PD-1 antibody molecule comprises a VL comprising the amino acid sequence of SEQ ID NO: 310, or an amino acid sequence at least 85%, 90%, 95%, or 99% identical or higher to SEQ ID NO: 310. In one embodiment, the anti-PD-1 antibody molecule comprises a VH comprising the amino acid sequence of SEQ ID NO: 300 and a VL comprising the amino acid sequence of SEQ ID NO: 314. In one embodiment, the anti-PD-1 antibody molecule comprises a VH comprising the amino acid sequence of SEQ ID NO: 300 and a VL comprising the amino acid sequence of SEQ ID NO: 310.

[0978] In one embodiment, the antibody molecule comprises a VH encoded by the nucleotide sequence of SEQ ID NO: 301, or a nucleotide sequence at least 85%, 90%, 95%, or 99% identical or higher to SEQ ID NO: 301. In one embodiment, the antibody molecule comprises a VL encoded by the nucleotide sequence of SEQ ID NO: 315 or 311, or a nucleotide sequence at least 85%, 90%, 95%, or 99% identical or higher to SEQ ID NO: 315 or 311. In one embodiment, the antibody molecule comprises a VH encoded by the nucleotide sequence of SEQ ID NO: 301 and a VL encoded by the nucleotide sequence of SEQ ID NO: 315 or 311.

[0979] In one embodiment, the anti-PD-1 antibody molecule comprises a heavy chain comprising the amino acid sequence of SEQ ID NO: 302, or an amino acid sequence at least 85%, 90%, 95%, or 99% identical or higher to SEQ ID NO: 302. In one embodiment, the anti-PD-1 antibody molecule comprises a light chain comprising the amino acid sequence of SEQ ID NO: 316, or an amino acid sequence at least 85%, 90%, 95%, or 99% identical or higher to SEQ ID NO: 316. In one embodiment, the anti-PD-1 antibody molecule comprises a light chain comprising the amino acid sequence of SEQ ID NO: 312, or an amino acid sequence at least 85%, 90%, 95%, or 99% identical or higher to SEQ ID NO: 312. In one embodiment, the anti-PD-1 antibody molecule comprises a heavy chain comprising the amino acid sequence of SEQ ID NO: 302 and a light chain comprising the amino acid sequence of SEQ ID NO: 316. In one embodiment, the anti-PD-1 antibody molecule comprises a heavy chain comprising the amino acid sequence of SEQ ID NO: 302 and a light chain comprising the amino acid sequence of SEQ ID NO: 312.

[0980] In one embodiment, the antibody molecule comprises a heavy chain encoded by the nucleotide sequence of SEQ ID NO: 303, or a nucleotide sequence at least 85%, 90%, 95%, or 99% identical or higher to SEQ ID NO: 303. In one embodiment, the antibody molecule comprises a light chain encoded by the nucleotide sequence of SEQ ID NO: 317 or 313, or a nucleotide sequence at least 85%, 90%, 95%, or 99% identical or higher to SEQ ID NO: 317 or 313. In one embodiment, the antibody molecule comprises a heavy chain encoded by the nucleotide sequence of SEQ ID NO: 303 and a light chain encoded by the nucleotide sequence of SEQ ID NO: 317 or 313.

[0981] The antibody molecules described herein can be made by vectors, host cells, and methods described in US 2015/0210769, incorporated by reference in its entirety.

TABLE 7
Amino acid and nucleotide sequences of exemplary anti-PD-1 antibody
molecules
BAP049-Clone-B HC

| | | |
|---|---|---|
| SEQ ID NO: 295 (Kabat) | HCDR1 | TYWMH |
| SEQ ID NO: 296 (Kabat) | HCDR2 | NIYPGTGGSNEDEKEKN |
| SEQ ID NO: 297 (Kabat) | HCDR3 | WTTGTGAY |
| SEQ ID NO: 298 | HCDR1 | GYTFTTY |
| (Chothia) | | |
| SEQ ID NO: 299 | HCDR2 | YPGTGG |
| (Chothia) | | |
| SEQ ID NO: 297 | HCDR3 | WTTGTGAY |
| (Chothia) | | |
| SEQ ID NO: 300 | VH | EVQLVQSGAEVKKPGESLRISCKGSGYTFTTYWMHWVRQATGQG |
| | | LEWMGNIYPGTGGSNEDEKEKNRVTITADKSTSTAYMELSSLRSE |
| | | DTAVYYCTRWTTGTGAYWGQGTTVTVSS |
| SEQ ID NO: 301 | DNA VH | GAGGTGCAGCTGGTGCAGTCAGGCGCCGAAGTGAAGAAGCCCG |
| | | GCGAGTCACTGAGAATTAGCTGTAAAGGTTCAGGCTACACCTT |
| | | CACTACCTACTGGATGCACTGGGTCCGCCAGGCTACCGGTCAA |
| | | GGCCTCGAGTGGATGGGTAATATCTACCCCGGCACCGGCGGCT |
| | | CTAACTTCGACGAGAAGTTTAAGAATAGAGTGACTATCACCGC |
| | | CGATAAGTCTACTAGCACCGCCTATATGGAACTGTCTAGCCTGA |
| | | GATCAGAGGACACCGCCGTCTACTACTGCACTAGGTGGACTAC |
| | | CGGCACAGGCGCCTACTGGGGTCAAGGCACTACCGTGACCGTG |
| | | TCTAGC |
| SEQ ID NO: 302 | Heavy | EVQLVQSGAEVKKPGESLRISCKGSGYTFTTYWMHWVRQATGQG |
| | chain | LEWMGNIYPGTGGSNFDEKFKNRVTITADKSTSTAYMELSSLRSE |
| | | DTAVYYCTRWTTGTGAYWGQGTTVTVSSASTKGPSVFPLAPCSRS |
| | | TSESTAALGCLVKDYFPEPVTVSWNSGALTSGVHTFPAVLQSSGL |
| | | YSLSSVVTVPSSSLGTKTYTCNVDHKPSNTKVDKRVESKYGPPCPP |
| | | CPAPEFLGGPSVFLFPPKPKDTLMISRTPEVTCVVVDVSQEDPEVQF |
| | | NWYVDGVEVHNAKTKPREEQFNSTYRVVSVLTVLHQDWLNGKE |
| | | YKCKVSNKGLPSSIEKTISKAKGQPREPQVYTLPPSQEEMTKNQVS |
| | | LTCLVKGFYPSDIAVEWESNGQPENNYKTTPPVLDSDGSFFLYSRL |
| | | TVDKSRWQEGNVFSCSVMHEALHNHYTQKSLSLSLG |
| SEQ ID NO: 303 | DNA | GAGGTGCAGCTGGTGCAGTCAGGCGCCGAAGTGAAGAAGCCCG |
| | heavy | GCGAGTCACTGAGAATTAGCTGTAAAGGTTCAGGCTACACCTT |
| | chain | CACTACCTACTGGATGCACTGGGTCCGCCAGGCTACCGGTCAA |
| | | GGCCTCGAGTGGATGGGTAATATCTACCCCGGCACCGGCGGCT |
| | | CTAACTTCGACGAGAAGTTTAAGAATAGAGTGACTATCACCGC |
| | | CGATAAGTCTACTAGCACCGCCTATATGGAACTGTCTAGCCTGA |
| | | GATCAGAGGACACCGCCGTCTACTACTGCACTAGGTGGACTAC |
| | | CGGCACAGGCGCCTACTGGGGTCAAGGCACTACCGTGACCGTG |
| | | TCTAGCGCTAGCACTAAGGGCCCGTCCGTGTTCCCCCTGGCACC |
| | | TTGTAGCCGGAGCACTAGCGAATCCACCGCTGCCCTCGGCTGCC |
| | | TGGTCAAGGATTACTTCCCGGAGCCCGTGACCGTGTCCTGGAAC |
| | | AGCGGAGCCCTGACCTCCGGAGTGCACACCTTCCCCGCTGTGCT |
| | | GCAGAGCTCCGGGCTGTACTCGCTGTCGTCGGTGGTCACGGTGC |
| | | CTTCATCTAGCCTGGGTACCAAGACCTACACTTGCAACGTGGAC |
| | | CACAAGCCTTCCAACACTAAGGTGGACAAGCGCGTCGAATCGA |
| | | AGTACGGCCCACCGTGCCCGCCTTGTCCCGCGCCGGAGTTCCTC |
| | | GGCGGTCCCTCGGTCTTTCTGTTCCCACCGAAGCCCAAGGACAC |
| | | TTTGATGATTTCCCGCACCCCTGAAGTGACATGCGTGGTCGTGG |
| | | ACGTGTCACAGGAAGATCCGGAGGTGCAGTTCAATTGGTACGT |
| | | GGATGGCGTCGAGGTGCACAACGCCAAAACCAAGCCGAGGGA |
| | | GGAGCAGTTCAACTCCACTTACCGCGTCGTGTCCGTGCTGACGG |
| | | TGCTGCATCAGGACTGGCTGAACGGGAAGGAGTACAAGTGCAA |
| | | AGTGTCCAACAAGGGACTTCCTAGCTCAATCGAAAAGACCATC |
| | | TCGAAAGCCAAGGGACAGCCCCGGGAACCCCAAGTGTATACCC |
| | | TGCCACCGAGCCAGGAAGAAATGACTAAGAACCAAGTCTCATT |
| | | GACTTGCCTTGTGAAGGGCTTCTACCCATCGGATATCGCCGTGG |
| | | AATGGGAGTCCAACGGCCAGCCGGAAAACAACTACAAGACCA |
| | | CCCCTCCGGTGCTGGACTCAGACGGATCCTTCTTCCTCTACTCG |
| | | CGGCTGACCGTGGATAAGAGCAGATGGCAGGAGGGAAATGTGT |
| | | TCAGCTGTTCTGTGATGCATGAAGCCCTGCACAACCACTACACT |
| | | CAGAAGTCCCTGTCCCTCTCCCTGGGA |

BAP049-Clone-B LC

| | | |
|---|---|---|
| SEQ ID NO: 304 (Kabat) | LCDR1 | KSSQSLLDSGNQKNFLT |
| SEQ ID NO: 305 (Kabat) | LCDR2 | WASTRES |
| SEQ ID NO: 306 (Kabat) | LCDR3 | QNDYSYPYT |
| SEQ ID NO: | LCDR1 | SQSLLDSGNQKNF |
| 307 (Chothia) | | |
| SEQ ID NO: 308 | LCDR2 | WAS |
| (Chothia) | | |
| SEQ ID NO: 309 | LCDR3 | DYSYPY |
| (Chothia) | | |
| SEQ ID NO: 310 | VL | EIVLTQSPATLSLSPGERATLSCKSSQSLLDSGNQKNFLTWYQQKP |
| | | GKAPKLLIYWASTRESGVPSRFSGSGSGTDFTFTISSLQPEDIATYY |
| | | CQNDYSYPYTFGQGTKVEIK |
| SEQ ID NO: 311 | DNA VL | GAGATCGTCCTGACTCAGTCACCCGCTACCCTGAGCCTGAGCCC |
| | | TGGCGAGCGGGCTACACTGAGCTGTAAATCTAGTCAGTCACTG |
| | | CTGGATAGCGGTAATCAGAAGAACTTCCTGACCTGGTATCAGC |
| | | AGAAGCCCGGTAAAGCCCCTAAGCTGCTGATCTACTGGGCCTC |
| | | TACTAGAGAATCAGGCGTGCCCTCTAGGTTTAGCGGTAGCGGT |
| | | AGTGGCACCGACTTCACCTTCACTATCTCTAGCCTGCAGCCCGA |
| | | GGATATCGCTACCTACTACTGTCAGAACGACTATAGCTACCCCT |
| | | ACACCTTCGGTCAAGGCACTAAGGTCGAGATTAAG |
| SEQ ID NO: 312 | Light | EIVLTQSPATLSLSPGERATLSCKSSQSLLDSGNQKNFLTWYQQKP |
| | chain | GKAPKLLIYWASTRESGVPSRFSGSGSGTDFTFTISSLQPEDIATYY |
| | | CQNDYSYPYTFGQGTKVEIKRTVAAPSVFIFPPSDEQLKSGTASVV |
| | | CLLNNFYPREAKVQWKVDNALQSGNSQESVTEQDSKDSTYSLSST |
| | | LTLSKADYEKHKVYACEVTHQGLSSPVTKSFNRGEC |
| SEQ ID NO: 313 | DNA | GAGATCGTCCTGACTCAGTCACCCGCTACCCTGAGCCTGAGCCC |
| | light | TGGCGAGCGGGCTACACTGAGCTGTAAATCTAGTCAGTCACTG |
| | chain | CTGGATAGCGGTAATCAGAAGAACTTCCTGACCTGGTATCAGC |
| | | AGAAGCCCGGTAAAGCCCCTAAGCTGCTGATCTACTGGGCCTC |
| | | TACTAGAGAATCAGGCGTGCCCTCTAGGTTTAGCGGTAGCGGT |
| | | AGTGGCACCGACTTCACCTTCACTATCTCTAGCCTGCAGCCCGA |
| | | GGATATCGCTACCTACTACTGTCAGAACGACTATAGCTACCCCT |
| | | ACACCTTCGGTCAAGGCACTAAGGTCGAGATTAAGCGTACGGT |
| | | GGCCGCTCCCAGCGTGTTCATCTTCCCCCCCAGCGACGAGCAGC |
| | | TGAAGAGCGGCACCGCCAGCGTGGTGTGCCTGCTGAACAACTT |
| | | CTACCCCCGGGAGGCCAAGGTGCAGTGGAAGGTGGACAACGCC |
| | | CTGCAGAGCGGCAACAGCCAGGAGAGCGTCACCGAGCAGGAC |
| | | AGCAAGGACTCCACCTACAGCCTGAGCAGCACCCTGACCCTGA |
| | | GCAAGGCCGACTACGAGAAGCATAAGGTGTACGCCTGCGAGGT |
| | | GACCCACCAGGGCCTGTCCAGCCCCGTGACCAAGAGCTTCAAC |
| | | AGGGGCGAGTGC |

BAP049-Clone-E HC

| | | |
|---|---|---|
| SEQ ID NO: 295 (Kabat) | HCDR1 | TYWMH |
| SEQ ID NO: 296 (Kabat) | HCDR2 | NIYPGTGGSNEDEKEKN |
| SEQ ID NO: 297 (Kabat) | HCDR3 | WTTGTGAY |
| SEQ ID NO: 298 | HCDR1 | GYTFTTY |
| (Chothia) | | |
| SEQ ID NO: 299 | HCDR2 | YPGTGG |
| (Chothia) | | |
| SEQ ID NO: 297 | HCDR3 | WTTGTGAY |
| (Chothia) | | |
| SEQ ID NO: 300 | VH | EVQLVQSGAEVKKPGESLRISCKGSGYTFTTYWMHWVRQATGQG |
| | | LEWMGNIYPGTGGSNEDEKEKNRVTITADKSTSTAYMELSSLRSE |
| | | DTAVYYCTRWTTGTGAYWGQGTTVTVSS |
| SEQ ID NO: 301 | DNA VH | GAGGTGCAGCTGGTGCAGTCAGGCGCCGAAGTGAAGAAGCCCG |
| | | GCGAGTCACTGAGAATTAGCTGTAAAGGTTCAGGCTACACCTT |
| | | CACTACCTACTGGATGCACTGGGTCCGCCAGGCTACCGGTCAA |
| | | GGCCTCGAGTGGATGGGTAATATCTACCCCGGCACCGGCGGCT |
| | | CTAACTTCGACGAGAAGTTTAAGAATAGAGTGACTATCACCGC |
| | | CGATAAGTCTACTAGCACCGCCTATATGGAACTGTCTAGCCTGA |
| | | GATCAGAGGACACCGCCGTCTACTACTGCACTAGGTGGACTAC |
| | | CGGCACAGGCGCCTACTGGGGTCAAGGCACTACCGTGACCGTG |
| | | TCTAGC |
| SEQ ID NO: 302 | Heavy | EVQLVQSGAEVKKPGESLRISCKGSGYTFTTYWMHWVRQATGQG |
| | chain | LEWMGNIYPGTGGSNFDEKFKNRVTITADKSTSTAYMELSSLRSE |
| | | DTAVYYCTRWTTGTGAYWGQGTTVTVSSASTKGPSVFPLAPCSRS |
| | | TSESTAALGCLVKDYFPEPVTVSWNSGALTSGVHTFPAVLQSSGL |
| | | YSLSSVVTVPSSSLGTKTYTCNVDHKPSNTKVDKRVESKYGPPCPP |
| | | CPAPEFLGGPSVFLFPPKPKDTLMISRTPEVTCVVVDVSQEDPEVQF |
| | | NWYVDGVEVHNAKTKPREEQFNSTYRVVSVLTVLHQDWLNGKE |
| | | YKCKVSNKGLPSSIEKTISKAKGQPREPQVYTLPPSQEEMTKNQVS |
| | | LTCLVKGFYPSDIAVEWESNGQPENNYKTTPPVLDSDGSFFLYSRL |
| | | TVDKSRWQEGNVFSCSVMHEALHNHYTQKSLSLSLG |
| SEQ ID NO: 303 | DNA | GAGGTGCAGCTGGTGCAGTCAGGCGCCGAAGTGAAGAAGCCCG |
| | heavy | GCGAGTCACTGAGAATTAGCTGTAAAGGTTCAGGCTACACCTT |
| | chain | CACTACCTACTGGATGCACTGGGTCCGCCAGGCTACCGGTCAA |
| | | GGCCTCGAGTGGATGGGTAATATCTACCCCGGCACCGGCGGCT |
| | | CTAACTTCGACGAGAAGTTTAAGAATAGAGTGACTATCACCGC |
| | | CGATAAGTCTACTAGCACCGCCTATATGGAACTGTCTAGCCTGA |
| | | GATCAGAGGACACCGCCGTCTACTACTGCACTAGGTGGACTAC |
| | | CGGCACAGGCGCCTACTGGGGTCAAGGCACTACCGTGACCGTG |
| | | TCTAGCGCTAGCACTAAGGGCCCGTCCGTGTTCCCCCTGGCACC |
| | | TTGTAGCCGGAGCACTAGCGAATCCACCGCTGCCCTCGGCTGCC |
| | | TGGTCAAGGATTACTTCCCGGAGCCCGTGACCGTGTCCTGGAAC |
| | | AGCGGAGCCCTGACCTCCGGAGTGCACACCTTCCCCGCTGTGCT |
| | | GCAGAGCTCCGGGCTGTACTCGCTGTCGTCGGTGGTCACGGTGC |
| | | CTTCATCTAGCCTGGGTACCAAGACCTACACTTGCAACGTGGAC |
| | | CACAAGCCTTCCAACACTAAGGTGGACAAGCGCGTCGAATCGA |
| | | AGTACGGCCCACCGTGCCCGCCTTGTCCCGCGCCGGAGTTCCTC |
| | | GGCGGTCCCTCGGTCTTTCTGTTCCCACCGAAGCCCAAGGACAC |
| | | TTTGATGATTTCCCGCACCCCTGAAGTGACATGCGTGGTCGTGG |
| | | ACGTGTCACAGGAAGATCCGGAGGTGCAGTTCAATTGGTACGT |
| | | GGATGGCGTCGAGGTGCACAACGCCAAAACCAAGCCGAGGGA |
| | | GGAGCAGTTCAACTCCACTTACCGCGTCGTGTCCGTGCTGACGG |
| | | TGCTGCATCAGGACTGGCTGAACGGGAAGGAGTACAAGTGCAA |
| | | AGTGTCCAACAAGGGACTTCCTAGCTCAATCGAAAAGACCATC |
| | | TCGAAAGCCAAGGGACAGCCCCGGGAACCCCAAGTGTATACCC |
| | | TGCCACCGAGCCAGGAAGAAATGACTAAGAACCAAGTCTCATT |
| | | GACTTGCCTTGTGAAGGGCTTCTACCCATCGGATATCGCCGTGG |
| | | AATGGGAGTCCAACGGCCAGCCGGAAAACAACTACAAGACCA |
| | | CCCCTCCGGTGCTGGACTCAGACGGATCCTTCTTCCTCTACTCG |
| | | CGGCTGACCGTGGATAAGAGCAGATGGCAGGAGGGAAATGTGT |
| | | TCAGCTGTTCTGTGATGCATGAAGCCCTGCACAACCACTACACT |
| | | CAGAAGTCCCTGTCCCTCTCCCTGGGA |

BAP049-Clone-E LC

| | | |
|---|---|---|
| SEQ ID NO: 304 (Kabat) | LCDR1 | KSSQSLLDSGNQKNFLT |
| SEQ ID NO: 305 (Kabat) | LCDR2 | WASTRES |
| SEQ ID NO: 306 (Kabat) | LCDR3 | QNDYSYPYT |
| SEQ ID NO: 307 | LCDR1 | SQSLLDSGNQKNF |
| (Chothia) | | |
| SEQ ID NO: 308 | LCDR2 | WAS |
| (Chothia) | | |
| SEQ ID NO: 309 | LCDR3 | DYSYPY |
| (Chothia) | | |
| SEQ ID NO: 314 | VL | EIVLTQSPATLSLSPGERATLSCKSSQSLLDSGNQKNFLTWYQQKP |
| | | GQAPRLLIYWASTRESGVPSRFSGSGSGTDFTFTISSLEAEDAATYY |
| | | CQNDYSYPYTFGQGTKVEIK |
| SEQ ID NO: 315 | DNA VL | GAGATCGTCCTGACTCAGTCACCCGCTACCCTGAGCCTGAGCCC |
| | | TGGCGAGCGGGCTACACTGAGCTGTAAATCTAGTCAGTCACTG |
| | | CTGGATAGCGGTAATCAGAAGAACTTCCTGACCTGGTATCAGC |
| | | AGAAGCCCGGTCAAGCCCCTAGACTGCTGATCTACTGGGCCTCT |
| | | ACTAGAGAATCAGGCGTGCCCTCTAGGTTTAGCGGTAGCGGTA |
| | | GTGGCACCGACTTCACCTTCACTATCTCTAGCCTGGAAGCCGAG |
| | | GACGCCGCTACCTACTACTGTCAGAACGACTATAGCTACCCCTA |
| | | CACCTTCGGTCAAGGCACTAAGGTCGAGATTAAG |
| SEQ ID NO: 316 | Light | EIVLTQSPATLSLSPGERATLSCKSSQSLLDSGNQKNFLTWYQQKP |
| | chain | GQAPRLLIYWASTRESGVPSRFSGSGSGTDFTFTISSLEAEDAATYY |
| | | CQNDYSYPYTFGQGTKVEIKRTVAAPSVFIFPPSDEQLKSGTASVV |
| | | CLLNNFYPREAKVQWKVDNALQSGNSQESVTEQDSKDSTYSLSST |
| | | LTLSKADYEKHKVYACEVTHQGLSSPVTKSFNRGEC |
| SEQ ID NO: 317 | DNA | GAGATCGTCCTGACTCAGTCACCCGCTACCCTGAGCCTGAGCCC |
| | light | TGGCGAGCGGGCTACACTGAGCTGTAAATCTAGTCAGTCACTG |
| | chain | CTGGATAGCGGTAATCAGAAGAACTTCCTGACCTGGTATCAGC |
| | | AGAAGCCCGGTCAAGCCCCTAGACTGCTGATCTACTGGGCCTCT |
| | | ACTAGAGAATCAGGCGTGCCCTCTAGGTTTAGCGGTAGCGGTA |
| | | GTGGCACCGACTTCACCTTCACTATCTCTAGCCTGGAAGCCGAG |
| | | GACGCCGCTACCTACTACTGTCAGAACGACTATAGCTACCCCTA |
| | | CACCTTCGGTCAAGGCACTAAGGTCGAGATTAAGCGTACGGTG |
| | | GCCGCTCCCAGCGTGTTCATCTTCCCCCCCAGCGACGAGCAGCT |
| | | GAAGAGCGGCACCGCCAGCGTGGTGTGCCTGCTGAACAACTTC |
| | | TACCCCCGGGAGGCCAAGGTGCAGTGGAAGGTGGACAACGCCC |
| | | TGCAGAGCGGCAACAGCCAGGAGAGCGTCACCGAGCAGGACA |
| | | GCAAGGACTCCACCTACAGCCTGAGCAGCACCCTGACCCTGAG |
| | | CAAGGCCGACTACGAGAAGCATAAGGTGTACGCCTGCGAGGTG |
| | | ACCCACCAGGGCCTGTCCAGCCCCGTGACCAAGAGCTTCAACA |
| | | GGGGCGAGTGC |

BAP049-Clone-B HC

| | | |
|---|---|---|
| SEQ ID NO: 318 (Kabat) | HCDR1 | ACCTACTGGATGCAC |
| SEQ ID NO: 319 (Kabat) | HCDR2 | AATATCTACCCCGGCACCGGCGGCTCTAACTTCGACGAGAAGT |
| | | TTAAGAAT |
| SEQ ID NO: 320 (Kabat) | HCDR3 | TGGACTACCGGCACAGGCGCCTAC |
| SEQ ID NO: 321 | HCDR1 | GGCTACACCTTCACTACCTAC |
| (Chothia) | | |
| SEQ ID NO: 322 | HCDR2 | TACCCCGGCACCGGCGGC |
| (Chothia) | | |
| SEQ ID NO: 320 | HCDR3 | TGGACTACCGGCACAGGCGCCTAC |
| (Chothia) | | |

BAP049-Clone-B LC

| | | |
|---|---|---|
| SEQ ID NO: 323 (Kabat) | LCDR1 | AAATCTAGTCAGTCACTGCTGGATAGCGGTAATCAGAAGAACT |
| | | TCCTGACC |
| SEQ ID NO: 324 (Kabat) | LCDR2 | TGGGCCTCTACTAGAGAATCA |
| SEQ ID NO: 325 (Kabat) | LCDR3 | CAGAACGACTATAGCTACCCCTACACC |
| SEQ ID NO: 326 | LCDR1 | AGTCAGTCACTGCTGGATAGCGGTAATCAGAAGAACTTC |
| (Chothia) | | |
| SEQ ID NO: 327 | LCDR2 | TGGGCCTCT |
| (Chothia) | | |
| SEQ ID NO: 353 | LCDR3 | GACTATAGCTACCCCTAC |
| (Chothia) | | |

BAP049-Clone-E HC

| | | |
|---|---|---|
| SEQ ID NO: 318 (Kabat) | HCDR1 | ACCTACTGGATGCAC |
| SEQ ID NO: 319 (Kabat) | HCDR2 | AATATCTACCCCGGCACCGGCGGCTCTAACTTCGACGAGAAGT |
| | | TTAAGAAT |
| SEQ ID NO: 320 (Kabat) | HCDR3 | TGGACTACCGGCACAGGCGCCTAC |
| SEQ ID NO: 321 | HCDR1 | GGCTACACCTTCACTACCTAC |
| (Chothia) | | |
| SEQ ID NO: 322 | HCDR2 | TACCCCGGCACCGGCGGC |
| (Chothia) | | |
| SEQ ID NO: 320 | HCDR3 | TGGACTACCGGCACAGGCGCCTAC |
| (Chothia) | | |

BAP049-Clone-E LC

| | | |
|---|---|---|
| SEQ ID NO: 323 (Kabat) | LCDR1 | AAATCTAGTCAGTCACTGCTGGATAGCGGTAATCAGAAGAACT |
| | | TCCTGACC |
| SEQ ID NO: 324 (Kabat) | LCDR2 | TGGGCCTCTACTAGAGAATCA |
| SEQ ID NO: 325 (Kabat) | LCDR3 | CAGAACGACTATAGCTACCCCTACACC |
| SEQ ID NO: 326 | LCDR1 | AGTCAGTCACTGCTGGATAGCGGTAATCAGAAGAACTTC |
| (Chothia) | | |
| SEQ ID NO: 327 | LCDR2 | TGGGCCTCT |
| (Chothia) | | |
| SEQ ID NO: 353 | LCDR3 | GACTATAGCTACCCCTAC |
| (Chothia) | | |

[0982] Other Exemplary PD-1 Inhibitors

[0983] In one embodiment, the anti-PD-1 antibody molecule is Nivolumab (Bristol-Myers Squibb), also known as MDX-1106, MDX-1106-04, ONO-4538, BMS-936558, or OPDIVO®. Nivolumab (clone 5C4) and other anti-PD-1 antibodies are disclosed in U.S. Pat. No. 8,008,449 and WO 2006/121168, incorporated by reference in their entirety. In one embodiment, the anti-PD-1 antibody molecule comprises one or more of the CDR sequences (or collectively all of the CDR sequences), the heavy chain or light chain variable region sequence, or the heavy chain or light chain sequence of Nivolumab, e.g., as disclosed in Table.

[0984] In one embodiment, the anti-PD-1 antibody molecule is Pembrolizumab (Merck & Co), also known as Lambrolizumab, MK-3475, MK03475, SCH-900475, or KEYTRUDA®. Pembrolizumab and other anti-PD-1 antibodies are disclosed in Hamid, 0. et al. (2013) New England Journal of Medicine 369 (2): 134-44, U.S. Pat. No. 8,354,509, and WO 2009/114335, incorporated by reference in their entirety. In one embodiment, the anti-PD-1 antibody molecule comprises one or more of the CDR sequences (or collectively all of the CDR sequences), the heavy chain or light chain variable region sequence, or the heavy chain or light chain sequence of Pembrolizumab, e.g., as disclosed in Table 8.

[0985] In one embodiment, the anti-PD-1 antibody molecule is Pidilizumab (CureTech), also known as CT-011. Pidilizumab and other anti-PD-1 antibodies are disclosed in Rosenblatt, J. et al. (2011) J Immunotherapy 34(5): 409-18, U.S. Pat. Nos. 7,695,715, 7,332,582, and 8,686,119, incorporated by reference in their entirety. In one embodiment, the anti-PD-1 antibody molecule comprises one or more of the CDR sequences (or collectively all of the CDR sequences), the heavy chain or light chain variable region sequence, or the heavy chain or light chain sequence of Pidilizumab, e.g., as disclosed in Table 8.

[0986] In one embodiment, the anti-PD-1 antibody molecule is MEDI0680 (Medimmune), also known as AMP-514. MEDI0680 and other anti-PD-1 antibodies are disclosed in U.S. Pat. No. 9,205,148 and WO 2012/145493, incorporated by reference in their entirety. In one embodiment, the anti-PD-1 antibody molecule comprises one or more of the CDR sequences (or collectively all of the CDR sequences), the heavy chain or light chain variable region sequence, or the heavy chain or light chain sequence of MEDI0680.

[0987] In one embodiment, the anti-PD-1 antibody molecule is REGN2810 (Regeneron). In one embodiment, the anti-PD-1 antibody molecule comprises one or more of the CDR sequences (or collectively all of the CDR sequences), the heavy chain or light chain variable region sequence, or the heavy chain or light chain sequence of REGN2810.

[0988] In one embodiment, the anti-PD-1 antibody molecule is PF-06801591 (Pfizer). In one embodiment, the anti-PD-1 antibody molecule comprises one or more of the CDR sequences (or collectively all of the CDR sequences), the heavy chain or light chain variable region sequence, or the heavy chain or light chain sequence of PF-06801591.

[0989] In one embodiment, the anti-PD-1 antibody molecule is BGB-A317 or BGB-108 (Beigene). In one embodiment, the anti-PD-1 antibody molecule comprises one or more of the CDR sequences (or collectively all of the CDR sequences), the heavy chain or light chain variable region sequence, or the heavy chain or light chain sequence of BGB-A317 or BGB-108.

[0990] In one embodiment, the anti-PD-1 antibody molecule is INCSHR1210 (Incyte), also known as INCSHR01210 or SHR-1210. In one embodiment, the anti-PD-1 antibody molecule comprises one or more of the CDR sequences (or collectively all of the CDR sequences), the heavy chain or light chain variable region sequence, or the heavy chain or light chain sequence of INCSHR1210.

[0991] In one embodiment, the anti-PD-1 antibody molecule is TSR-042 (Tesaro), also known as ANB011. In one embodiment, the anti-PD-1 antibody molecule comprises one or more of the CDR sequences (or collectively all of the CDR sequences), the heavy chain or light chain variable region sequence, or the heavy chain or light chain sequence of TSR-042.

[0992] Further known anti-PD-1 antibodies include those described, e.g., in WO 2015/112800, WO 2016/092419, WO 2015/085847, WO 2014/179664, WO 2014/194302, WO 2014/209804, WO 2015/200119, U.S. Pat. Nos. 8,735,553, 7,488,802, 8,927,697, 8,993,731, and 9,102,727, incorporated by reference in their entirety.

[0993] In one embodiment, the anti-PD-1 antibody is an antibody that competes for binding with, and/or binds to the same epitope on PD-1 as, one of the anti-PD-1 antibodies described herein.

[0994] In one embodiment, the PD-1 inhibitor is a peptide that inhibits the PD-1 signaling pathway, e.g., as described in U.S. Pat. No. 8,907,053, incorporated by reference in its entirety. In one embodiment, the PD-1 inhibitor is an immunoadhesin (e.g., an immunoadhesin comprising an extracellular or PD-1 binding portion of PD-L1 or PD-L2 fused to a constant region (e.g., an Fc region of an immunoglobulin sequence). In one embodiment, the PD-1 inhibitor is AMP-224 (B7-DCIg (Amplimmune), e.g., disclosed in WO 2010/027827 and WO 2011/066342, incorporated by reference in their entirety).

TABLE 8
Amino acid sequences of other exemplary anti-PD-1 antibody molecules
Nivolumab

| | | |
|---|---|---|
| SEQ ID NO: 354 | Heavy | QVQLVESGGGVVQPGRSLRLDCKASGITFSNSGMHWVRQAPGKGLEWVAV |
| | chain | IWYDGSKRYYADSVKGRFTISRDNSKNTLFLQMNSLRAEDTAVYYCATND |
| | | DYWGQGTLVTVSSASTKGPSVFPLAPCSRSTSESTAALGCLVKDYFPEPVTV |
| | | SWNSGALTSGVHTFPAVLQSSGLYSLSSVVTVPSSSLGTKTYTCNVDHKPSN |
| | | TKVDKRVESKYGPPCPPCPAPEFLGGPSVFLFPPKPKDTLMISRTPEVTCVVV |
| | | DVSQEDPEVQFNWYVDGVEVHNAKTKPREEQFNSTYRVVSVLTVLHQDW |
| | | LNGKEYKCKVSNKGLPSSIEKTISKAKGQPREPQVYTLPPSQEEMTKNQVSL |
| | | TCLVKGFYPSDIAVEWESNGQPENNYKTTPPVLDSDGSFFLYSRLTVDKSR |
| | | WQEGNVFSCSVMHEALHNHYTQKSLSLSLGK |
| SEQ ID NO: 355 | Light | EIVLTQSPATLSLSPGERATLSCRASQSVSSYLAWYQQKPGQAPRLLIYDASN |
| | chain | RATGIPARFSGSGSGTDFTLTISSLEPEDFAVYYCQQSSNWPRTFGQGTKVEI |
| | | KRTVAAPSVFIFPPSDEQLKSGTASVVCLLNNFYPREAKVQWKVDNALQSG |
| | | NSQESVTEQDSKDSTYSLSSTLTLSKADYEKHKVYACEVTHQGLSSPVTKSF |
| | | NRGEC |

Pembrolizumab

| | | |
|---|---|---|
| SEQ ID NO: 356 | Heavy | QVQLVQSGVEVKKPGASVKVSCKASGYTFTNYYMYWVRQAPGQGLEWM |
| | chain | GGINPSNGGTNFNEKFKNRVTLTTDSSTTTAYMELKSLQFDDTAVYYCARR |
| | | DYRFDMGFDYWGQGTTVTVSSASTKGPSVFPLAPCSRSTSESTAALGCLVK |
| | | DYFPEPVTVSWNSGALTSGVHTFPAVLQSSGLYSLSSVVTVPSSSLGTKTYT |
| | | CNVDHKPSNTKVDKRVESKYGPPCPPCPAPEFLGGPSVFLFPPKPKDTLMISR |
| | | TPEVTCVVVDVSQEDPEVQFNWYVDGVEVHNAKTKPREEQFNSTYRVVSV |
| | | LTVLHQDWLNGKEYKCKVSNKGLPSSIEKTISKAKGQPREPQVYTLPPSQEE |
| | | MTKNQVSLTCLVKGFYPSDIAVEWESNGQPENNYKTTPPVLDSDGSFFLYS |
| | | RLTVDKSRWQEGNVFSCSVMHEALHNHYTQKSLSLSLGK |
| SEQ ID NO: 357 | Light | EIVLTQSPATLSLSPGERATLSCRASKGVSTSGYSYLHWYQQKPGQAPRLLI |
| | chain | YLASYLESGVPARFSGSGSGTDFTLTISSLEPEDFAVYYCQHSRDLPLTFGGG |
| | | TKVEIKRTVAAPSVFIFPPSDEQLKSGTASVVCLLNNFYPREAKVQWKVDNA |
| | | LQSGNSQESVTEQDSKDSTYSLSSTLTLSKADYEKHKVYACEVTHQGLSSPV |
| | | TKSFNRGEC |

Pidilizumab

| | | |
|---|---|---|
| SEQ ID NO: 358 | Heavy | QVQLVQSGSELKKPGASVKISCKASGYTFTNYGMNWVRQAPGQGLQWMG |
| | chain | WINTDSGESTYAEEFKGRFVFSLDTSVNTAYLQITSLTAEDTGMYFCVRVGY |
| | | DALDYWGQGTLVTVSSASTKGPSVFPLAPSSKSTSGGTAALGCLVKDYFPEP |
| | | VTVSWNSGALTSGVHTFPAVLQSSGLYSLSSVVTVPSSSLGTQTYICNVNHK |
| | | PSNTKVDKRVEPKSCDKTHTCPPCPAPELLGGPSVFLFPPKPKDTLMISRTPE |
| | | VTCVVVDVSHEDPEVKFNWYVDGVEVHNAKTKPREEQYNSTYRVVSVLT |
| | | VLHQDWLNGKEYKCKVSNKALPAPIEKTISKAKGQPREPQVYTLPPSREEM |
| | | TKNQVSLTCLVKGFYPSDIAVEWESNGQPENNYKTTPPVLDSDGSFFLYSKL |
| | | TVDKSRWQQGNVFSCSVMHEALHNHYTQKSLSLSPGK |
| SEQ ID NO: 359 | Light | EIVLTQSPSSLSASVGDRVTITCSARSSVSYMHWFQQKPGKAPKLWIYRTSN |
| | chain | LASGVPSRFSGSGSGTSYCLTINSLQPEDFATYYCQQRSSFPLTFGGGTKLEIK |
| | | RTVAAPSVFIFPPSDEQLKSGTASVVCLLNNFYPREAKVQWKVDNALQSGN |
| | | SQESVTEQDSKDSTYSLSSTLTLSKADYEKHKVYACEVTHQGLSSPVTKSFN |
| | | RGEC |

[0995] Exemplary PD-L1 Inhibitors

[0996] In certain embodiments, the combination of the ENTPD2 antibody or antigen binding fragment thereof as described herein and the CD73 antibody or antigen binding fragment thereof as described herein is administered in combination with a PD-L1 inhibitor. The PD-L1 inhibitor may be an antibody, an antigen binding fragment thereof, an immunoadhesin, a fusion protein, or an oligopeptide. In some embodiments, the PD-L1 inhibitor is chosen from FAZ053 (Novartis), Atezolizumab (Genentech/Roche), Avelumab (Merck Serono and Pfizer), Durvalumab (MedImmune/AstraZeneca), or BMS-936559 (Bristol-Myers Squibb).

[0997] Exemplary Anti-PD-L1 Antibody Molecules

[0998] In one embodiment, the PD-L1 inhibitor is an anti-PD-L1 antibody molecule. In one embodiment, the PD-L1 inhibitor is an anti-PD-L1 antibody molecule as disclosed in US 2016/0108123, published on Apr. 21, 2016, entitled “Antibody Molecules to PD-L1 and Uses Thereof,” incorporated by reference in its entirety.

[0999] In one embodiment, the anti-PD-L1 antibody molecule comprises at least one, two, three, four, five or six complementarity determining regions (CDRs) (or collectively all of the CDRs) from a heavy and light chain variable region comprising an amino acid sequence shown in Table 25 (e.g., from the heavy and light chain variable region sequences of BAP058-Clone 0 or BAP058-Clone N disclosed in Table 25), or encoded by a nucleotide sequence shown in Table 25. In some embodiments, the CDRs are according to the Kabat definition (e.g., as set out in Table 25). In some embodiments, the CDRs are according to the Chothia definition (e.g., as set out in Table 25). In some embodiments, the CDRs are according to the combined CDR definitions of both Kabat and Chothia (e.g., as set out in Table 25). In one embodiment, the combination of Kabat and Chothia CDR of VH CDR1 comprises the amino acid sequence GYTFTSYWMY (SEQ ID NO: 640). In one embodiment, one or more of the CDRs (or collectively all of the CDRs) have one, two, three, four, five, six or more changes, e.g., amino acid substitutions (e.g., conservative amino acid substitutions) or deletions, relative to an amino acid sequence shown in Table 25, or encoded by a nucleotide sequence shown in Table 25.

[1000] In one embodiment, the anti-PD-L1 antibody molecule comprises a heavy chain variable region (VH) comprising a VHCDR1 amino acid sequence of SEQ ID NO: 641, a VHCDR2 amino acid sequence of SEQ ID NO: 642, and a VHCDR3 amino acid sequence of SEQ ID NO: 643; and a light chain variable region (VL) comprising a VLCDR1 amino acid sequence of SEQ ID NO: 649, a VLCDR2 amino acid sequence of SEQ ID NO: 650, and a VLCDR3 amino acid sequence of SEQ ID NO: 651, each disclosed in Table 25.

[1001] In one embodiment, the anti-PD-L1 antibody molecule comprises a VH comprising a VHCDR1 encoded by the nucleotide sequence of SEQ ID NO: 668, a VHCDR2 encoded by the nucleotide sequence of SEQ ID NO: 669, and a VHCDR3 encoded by the nucleotide sequence of SEQ ID NO: 670; and a VL comprising a VLCDR1 encoded by the nucleotide sequence of SEQ ID NO: 673, a VLCDR2 encoded by the nucleotide sequence of SEQ ID NO: 674, and a VLCDR3 encoded by the nucleotide sequence of SEQ ID NO: 675, each disclosed in Table 25.

[1002] In one embodiment, the anti-PD-L1 antibody molecule comprises a VH comprising the amino acid sequence of SEQ ID NO: 646, or an amino acid sequence having at least about 85%, 90%, 95%, or 99% sequence identity to SEQ ID NO: 646. In one embodiment, the anti-PD-L1 antibody molecule comprises a VL comprising the amino acid sequence of SEQ ID NO: 656, or an amino acid sequence having at least about 85%, 90%, 95%, or 99% sequence identity or higher to SEQ ID NO: 656. In one embodiment, the anti-PD-L1 antibody molecule comprises a VH comprising the amino acid sequence of SEQ ID NO: 660, or an amino acid sequence having at least about 85%, 90%, 95%, or 99% sequence identity to SEQ ID NO: 660. In one embodiment, the anti-PD-L1 antibody molecule comprises a VL comprising the amino acid sequence of SEQ ID NO: 664, or an amino acid sequence having at least about 85%, 90%, 95%, or 99% sequence identity to SEQ ID NO: 664. In one embodiment, the anti-PD-L1 antibody molecule comprises a VH comprising the amino acid sequence of SEQ ID NO: 646 and a VL comprising the amino acid sequence of SEQ ID NO: 656. In one embodiment, the anti-PD-L1 antibody molecule comprises a VH comprising the amino acid sequence of SEQ ID NO: 660 and a VL comprising the amino acid sequence of SEQ ID NO:664.

[1003] In one embodiment, the antibody molecule comprises a VH encoded by the nucleotide sequence of SEQ ID NO: 647, or a nucleotide sequence having at least about 85%, 90%, 95%, or 99% sequence identity to SEQ ID NO: 647. In one embodiment, the antibody molecule comprises a VL encoded by the nucleotide sequence of SEQ ID NO: 657, or a nucleotide sequence having at least about 85%, 90%, 95%, or 99% sequence identity to SEQ ID NO: 657. In one embodiment, the antibody molecule comprises a VH encoded by the nucleotide sequence of SEQ ID NO:661, or a nucleotide sequence having at least about 85%, 90%, 95%, or 99% sequence identity to SEQ ID NO: 661. In one embodiment, the antibody molecule comprises a VL encoded by the nucleotide sequence of SEQ ID NO: 665, or a nucleotide sequence having at least about 85%, 90%, 95%, or 99% sequence identity to SEQ ID NO: 665. In one embodiment, the antibody molecule comprises a VH encoded by the nucleotide sequence of SEQ ID NO: 647 and a VL encoded by the nucleotide sequence of SEQ ID NO: 657. In one embodiment, the antibody molecule comprises a VH encoded by the nucleotide sequence of SEQ ID NO: 661 and a VL encoded by the nucleotide sequence of SEQ ID NO: 665.

[1004] In one embodiment, the anti-PD-L1 antibody molecule comprises a heavy chain comprising the amino acid sequence of SEQ ID NO: 648, or an amino acid sequence having at least about 85%, 90%, 95%, or 99% sequence identity to SEQ ID NO: 648. In one embodiment, the anti-PD-L1 antibody molecule comprises a light chain comprising the amino acid sequence of SEQ ID NO: 658, or an amino acid sequence having at least about 85%, 90%, 95%, or 99% sequence identity to SEQ ID NO: 658. In one embodiment, the anti-PD-L1 antibody molecule comprises a heavy chain comprising the amino acid sequence of SEQ ID NO: 662, or an amino acid sequence having at least about 85%, 90%, 95%, or 99% sequence identity to SEQ ID NO: 662. In one embodiment, the anti-PD-L1 antibody molecule comprises a light chain comprising the amino acid sequence of SEQ ID NO: 666, or an amino acid sequence having at least about 85%, 90%, 95%, or 99% sequence identity to SEQ ID NO: 666. In one embodiment, the anti-PD-L1 antibody molecule comprises a heavy chain comprising the amino acid sequence of SEQ ID NO: 648 and a light chain comprising the amino acid sequence of SEQ ID NO:658. In one embodiment, the anti-PD-L1 antibody molecule comprises a heavy chain comprising the amino acid sequence of SEQ ID NO: 662 and a light chain comprising the amino acid sequence of SEQ ID NO: 666.

[1005] In one embodiment, the antibody molecule comprises a heavy chain encoded by the nucleotide sequence of SEQ ID NO: 655, or a nucleotide sequence having at least about 85%, 90%, 95%, or 99% sequence identity to SEQ ID NO: 655. In one embodiment, the antibody molecule comprises a light chain encoded by the nucleotide sequence of SEQ ID NO: 659, or a nucleotide sequence having at least about 85%, 90%, 95%, or 99% sequence identity to SEQ ID NO: 659. In one embodiment, the antibody molecule comprises a heavy chain encoded by the nucleotide sequence of SEQ ID NO: 663, or a nucleotide sequence having at least about 85%, 90%, 95%, or 99% sequence identity to SEQ ID NO: 663. In one embodiment, the antibody molecule comprises a light chain encoded by the nucleotide sequence of SEQ ID NO: 667, or a nucleotide sequence having at least about 85%, 90%, 95%, or 99% sequence identity to SEQ ID NO: 667. In one embodiment, the antibody molecule comprises a heavy chain encoded by the nucleotide sequence of SEQ ID NO: 655 and a light chain encoded by the nucleotide sequence of SEQ ID NO: 659. In one embodiment, the antibody molecule comprises a heavy chain encoded by the nucleotide sequence of SEQ ID NO: 663 and a light chain encoded by the nucleotide sequence of SEQ ID NO: 667.

[1006] The antibody molecules described herein can be made by vectors, host cells, and methods described in US 2016/0108123, incorporated by reference in its entirety.

TABLE 25
Amino acid and nucleotide sequences of exemplary anti-PD-Ll antibody molecules
BAP058-Clone O HC

| | | |
|---|---|---|
| SEQ ID NO: 64 1(Kabat) | HCDR1 | SYWMY |
| SEQ ID NO: 642 (Kabat) | HCDR2 | RIDPNSGSTKYNEKFKN |
| SEQ ID NO: 643 (Kabat) | HCDR3 | DYRKGLYAMDY |
| SEQ ID NO: 644 | HCDR1 | GYTFTSY |
| (Chothia) | | |
| SEQ ID NO: 645 | HCDR2 | DPNSGS |
| (Chothia) | | |
| SEQ ID NO: 643 | HCDR3 | DYRKGLYAMDY |
| (Chothia) | | |
| SEQ ID NO: 646 | VH | EVQLVQSGAEVKKPGATVKISCKVSGYTFTSYWMYWVRQARGQ |
| | | RLEWIGRIDPNSGSTKYNEKFKNRFTISRDNSKNTLYLQMNSLRA |
| | | EDTAVYYCARDYRKGLYAMDYWGQGTTVTVSS |
| SEQ ID NO: 647 | DNA VH | GAAGTGCAGCTGGTGCAGTCAGGCGCCGAAGTGAAGAAACCC |
| | | GGCGCTACCGTGAAGATTAGCTGTAAAGTCTCAGGCTACACCT |
| | | TCACTAGCTACTGGATGTACTGGGTCCGACAGGCTAGAGGGCA |
| | | AAGACTGGAGTGGATCGGTAGAATCGACCCTAATAGCGGCTC |
| | | TACTAAGTATAACGAGAAGTTTAAGAATAGGTTCACTATTAGT |
| | | AGGGATAACTCTAAGAACACCCTGTACCTGCAGATGAATAGC |
| | | CTGAGAGCCGAGGACACCGCCGTCTACTACTGCGCTAGAGACT |
| | | ATAGAAAGGGCCTGTACGCTATGGACTACTGGGGTCAAGGCA |
| | | CTACCGTGACCGTGTCTTCA |
| SEQ ID NO: 648 | Heavy | EVQLVQSGAEVKKPGATVKISCKVSGYTFTSYWMYWVRQARGQ |
| | chain | RLEWIGRIDPNSGSTKYNEKFKNRFTISRDNSKNTLYLQMNSLRA |
| | | EDTAVYYCARDYRKGLYAMDYWGQGTTVTVSSASTKGPSVFPL |
| | | APCSRSTSESTAALGCLVKDYFPEPVTVSWNSGALTSGVHTFPAV |
| | | LQSSGLYSLSSVVTVPSSSLGTKTYTCNVDIIKPSNTKVDKRVESK |
| | | YGPPCPPCPAPEFLGGPSVFLFPPKPKDTLMISRTPEVTCVVVDVS |
| | | QEDPEVQFNWYVDGVEVHNAKTKPREEQFNSTYRVVSVLTVLH |
| | | QDWLNGKEYKCKVSNKGLPSSIEKTISKAKGQPREPQVYTLPPSQ |
| | | EEMTKNQVSLTCLVKGFYPSDIAVEWESNGQPENNYKTTPPVLD |
| | | SDGSFFLYSRLTVDKSRWQEGNVFSCSVMHEALHNHYTQKSLSL |
| | | SLG |
| SEQ ID NO: 655 | DNA | GAAGTGCAGCTGGTGCAGTCAGGCGCCGAAGTGAAGAAACCC |
| | heavy | GGCGCTACCGTGAAGATTAGCTGTAAAGTCTCAGGCTACACCT |
| | chain | TCACTAGCTACTGGATGTACTGGGTCCGACAGGCTAGAGGGCA |
| | | AAGACTGGAGTGGATCGGTAGAATCGACCCTAATAGCGGCTC |
| | | TACTAAGTATAACGAGAAGTTTAAGAATAGGTTCACTATTAGT |
| | | AGGGATAACTCTAAGAACACCCTGTACCTGCAGATGAATAGC |
| | | CTGAGAGCCGAGGACACCGCCGTCTACTACTGCGCTAGAGACT |
| | | ATAGAAAGGGCCTGTACGCTATGGACTACTGGGGTCAAGGCA |
| | | CTACCGTGACCGTGTCTTCAGCTAGCACTAAGGGCCCGTCCGT |
| | | GTTCCCCCTGGCACCTTGTAGCCGGAGCACTAGCGAATCCACC |
| | | GCTGCCCTCGGCTGCCTGGTCAAGGATTACTTCCCGGAGCCCG |
| | | TGACCGTGTCCTGGAACAGCGGAGCCCTGACCTCCGGAGTGCA |
| | | CACCTTCCCCGCTGTGCTGCAGAGCTCCGGGCTGTACTCGCTG |
| | | TCGTCGGTGGTCACGGTGCCTTCATCTAGCCTGGGTACCAAGA |
| | | CCTACACTTGCAACGTGGACCACAAGCCTTCCAACACTAAGGT |
| | | GGACAAGCGCGTCGAATCGAAGTACGGCCCACCGTGCCCGCC |
| | | TTGTCCCGCGCCGGAGTTCCTCGGCGGTCCCTCGGTCTTTCTGT |
| | | TCCCACCGAAGCCCAAGGACACTTTGATGATTTCCCGCACCCC |
| | | TGAAGTGACATGCGTGGTCGTGGACGTGTCACAGGAAGATCC |
| | | GGAGGTGCAGTTCAATTGGTACGTGGATGGCGTCGAGGTGCA |
| | | CAACGCCAAAACCAAGCCGAGGGAGGAGCAGTTCAACTCCAC |
| | | TTACCGCGTCGTGTCCGTGCTGACGGTGCTGCATCAGGACTGG |
| | | CTGAACGGGAAGGAGTACAAGTGCAAAGTGTCCAACAAGGGA |
| | | CTTCCTAGCTCAATCGAAAAGACCATCTCGAAAGCCAAGGGA |
| | | CAGCCCCGGGAACCCCAAGTGTATACCCTGCCACCGAGCCAG |
| | | GAAGAAATGACTAAGAACCAAGTCTCATTGACTTGCCTTGTGA |
| | | AGGGCTTCTACCCATCGGATATCGCCGTGGAATGGGAGTCCAA |
| | | CGGCCAGCCGGAAAACAACTACAAGACCACCCCTCCGGTGCT |
| | | GGACTCAGACGGATCCTTCTTCCTCTACTCGCGGCTGACCGTG |
| | | GATAAGAGCAGATGGCAGGAGGGAAATGTGTTCAGCTGTTCT |
| | | GTGATGCATGAAGCCCTGCACAACCACTACACTCAGAAGTCCC |
| | | TGTCCCTCTCCCTGGGA |

BAP058-Clone O LC

| | | |
|---|---|---|
| SEQ ID NO: 649 | LCDR1 | KASQDVGTAVA |
| (Kabat) | | |
| SEQ ID NO: 650 (Kabat) | LCDR2 | WASTRHT |
| SEQ ID NO: 651 (Kabat) | LCDR3 | QQYNSYPLT |
| SEQ ID NO: 652 (Chothia) | LCDR1 | SQDVGTA |
| SEQ ID NO: 653 | LCDR2 | WAS |
| (Chothia) | | |
| SEQ ID NO: 654 | LCDR3 | YNSYPL |
| (Chothia) | | |
| SEQ ID NO: 656 | VL | AIQLTQSPSSLSASVGDRVTITCKASQDVGTAVAWYLQKPGQSPQ |
| | | LLIYWASTRHTGVPSRFSGSGSGTDFTFTISSLEAEDAATYYCQQY |
| | | NSYPLTFGQGTKVEIK |
| SEQ ID NO: 657 | DNA VL | GCTATTCAGCTGACTCAGTCACCTAGTAGCCTGAGCGCTAGTG |
| | | TGGGCGATAGAGTGACTATCACCTGTAAAGCCTCTCAGGACGT |
| | | GGGCACCGCCGTGGCCTGGTATCTGCAGAAGCCTGGTCAATCA |
| | | CCTCAGCTGCTGATCTACTGGGCCTCTACTAGACACACCGGCG |
| | | TGCCCTCTAGGTTTAGCGGTAGCGGTAGTGGCACCGACTTCAC |
| | | CTTCACTATCTCTTCACTGGAAGCCGAGGACGCCGCTACCTAC |
| | | TACTGTCAGCAGTATAATAGCTACCCCCTGACCTTCGGTCAAG |
| | | GCACTAAGGTCGAGATTAAG |
| SEQ ID NO: 658 | Light | AIQLTQSPSSLSASVGDRVTITCKASQDVGTAVAWYLQKPGQSPQ |
| | chain | LLIYWASTRHTGVPSRFSGSGSGTDFTFTISSLEAEDAATYYCQQY |
| | | NSYPLTFGQGTKVEIKRTVAAPSVFIFPPSDEQLKSGTASVVCLLN |
| | | NFYPREAKVQWKVDNALQSGNSQESVTEQDSKDSTYSLSSTLTL |
| | | SKADYEKHKVYACEVTHQGLSSPVTKSFNRGEC |
| SEQ ID NO: 659 | DNA light | GCTATTCAGCTGACTCAGTCACCTAGTAGCCTGAGCGCTAGTG |
| | chain | TGGGCGATAGAGTGACTATCACCTGTAAAGCCTCTCAGGACGT |
| | | GGGCACCGCCGTGGCCTGGTATCTGCAGAAGCCTGGTCAATCA |
| | | CCTCAGCTGCTGATCTACTGGGCCTCTACTAGACACACCGGCG |
| | | TGCCCTCTAGGTTTAGCGGTAGCGGTAGTGGCACCGACTTCAC |
| | | CTTCACTATCTCTTCACTGGAAGCCGAGGACGCCGCTACCTAC |
| | | TACTGTCAGCAGTATAATAGCTACCCCCTGACCTTCGGTCAAG |
| | | GCACTAAGGTCGAGATTAAGCGTACGGTGGCCGCTCCCAGCGT |
| | | GTTCATCTTCCCCCCCAGCGACGAGCAGCTGAAGAGCGGCACC |
| | | GCCAGCGTGGTGTGCCTGCTGAACAACTTCTACCCCCGGGAGG |
| | | CCAAGGTGCAGTGGAAGGTGGACAACGCCCTGCAGAGCGGCA |
| | | ACAGCCAGGAGAGCGTCACCGAGCAGGACAGCAAGGACTCCA |
| | | CCTACAGCCTGAGCAGCACCCTGACCCTGAGCAAGGCCGACT |
| | | ACGAGAAGCATAAGGTGTACGCCTGCGAGGTGACCCACCAGG |
| | | GCCTGTCCAGCCCCGTGACCAAGAGCTTCAACAGGGGCGAGT |
| | | GC |

BAP058-Clone N HC

| | | |
|---|---|---|
| SEQ ID NO: 641 (Kabat) | HCDR1 | SYWMY |
| SEQ ID NO: 642 (Kabat) | HCDR2 | RIDPNSGSTKYNEKFKN |
| SEQ ID NO: 643 (Kabat) | HCDR3 | DYRKGLYAMDY |
| SEQ ID NO: 644 | HCDR1 | GYTFTSY |
| (Chothia) | | |
| SEQ ID NO: 645 | HCDR2 | DPNSGS |
| (Chothia) | | |
| SEQ ID NO: 643 (Chothia) | HCDR3 | DYRKGLYAMDY |
| SEQ ID NO: 660 | VH | EVQLVQSGAEVKKPGATVKISCKVSGYTFTSYWMYWVRQATGQ |
| | | GLEWMGRIDPNSGSTKYNEKFKNRVTITADKSTSTAYMELSSLRS |
| | | EDTAVYYCARDYRKGLYAMDYWGQGTTVTVSS |
| SEQ ID NO: 661 | DNA VH | GAAGTGCAGCTGGTGCAGTCAGGCGCCGAAGTGAAGAAACCC |
| | | GGCGCTACCGTGAAGATTAGCTGTAAAGTCTCAGGCTACACCT |
| | | TCACTAGCTACTGGATGTACTGGGTCCGACAGGCTACCGGTCA |
| | | AGGCCTGGAGTGGATGGGTAGAATCGACCCTAATAGCGGCTC |
| | | TACTAAGTATAACGAGAAGTTTAAGAATAGAGTGACTATCACC |
| | | GCCGATAAGTCTACTAGCACCGCCTATATGGAACTGTCTAGCC |
| | | TGAGATCAGAGGACACCGCCGTCTACTACTGCGCTAGAGACTA |
| | | TAGAAAGGGCCTGTACGCTATGGACTACTGGGGTCAAGGCAC |
| | | TACCGTGACCGTGTCTTCA |
| SEQ ID NO: 662 | Heavy | EVQLVQSGAEVKKPGATVKISCKVSGYTFTSYWMYWVRQATGQ |
| | chain | GLEWMGRIDPNSGSTKYNEKFKNRVTITADKSTSTAYMELSSLRS |
| | | EDTAVYYCARDYRKGLYAMDYWGQGTTVTVSSASTKGPSVFPL |
| | | APCSRSTSESTAALGCLVKDYFPEPVTVSWNSGALTSGVHTFPAV |
| | | LQSSGLYSLSSVVTVPSSSLGTKTYTCNVDIIKPSNTKVDKRVESK |
| | | YGPPCPPCPAPEFLGGPSVFLFPPKPKDTLMISRTPEVTCVVVDVS |
| | | QEDPEVQFNWYVDGVEVHNAKTKPREEQFNSTYRVVSVLTVLH |
| | | QDWLNGKEYKCKVSNKGLPSSIEKTISKAKGQPREPQVYTLPPSQ |
| | | EEMTKNQVSLTCLVKGFYPSDIAVEWESNGQPENNYKTTPPVLD |
| | | SDGSFFLYSRLTVDKSRWQEGNVFSCSVMHEALHNHYTQKSLSL |
| | | SLG |
| SEQ ID NO: 663 | DNA | GAAGTGCAGCTGGTGCAGTCAGGCGCCGAAGTGAAGAAACCC |
| | heavy | GGCGCTACCGTGAAGATTAGCTGTAAAGTCTCAGGCTACACCT |
| | chain | TCACTAGCTACTGGATGTACTGGGTCCGACAGGCTACCGGTCA |
| | | AGGCCTGGAGTGGATGGGTAGAATCGACCCTAATAGCGGCTC |
| | | TACTAAGTATAACGAGAAGTTTAAGAATAGAGTGACTATCACC |
| | | GCCGATAAGTCTACTAGCACCGCCTATATGGAACTGTCTAGCC |
| | | TGAGATCAGAGGACACCGCCGTCTACTACTGCGCTAGAGACTA |
| | | TAGAAAGGGCCTGTACGCTATGGACTACTGGGGTCAAGGCAC |
| | | TACCGTGACCGTGTCTTCAGCTAGCACTAAGGGCCCGTCCGTG |
| | | TTCCCCCTGGCACCTTGTAGCCGGAGCACTAGCGAATCCACCG |
| | | CTGCCCTCGGCTGCCTGGTCAAGGATTACTTCCCGGAGCCCGT |
| | | GACCGTGTCCTGGAACAGCGGAGCCCTGACCTCCGGAGTGCA |
| | | CACCTTCCCCGCTGTGCTGCAGAGCTCCGGGCTGTACTCGCTG |
| | | TCGTCGGTGGTCACGGTGCCTTCATCTAGCCTGGGTACCAAGA |
| | | CCTACACTTGCAACGTGGACCACAAGCCTTCCAACACTAAGGT |
| | | GGACAAGCGCGTCGAATCGAAGTACGGCCCACCGTGCCCGCC |
| | | TTGTCCCGCGCCGGAGTTCCTCGGCGGTCCCTCGGTCTTTCTGT |
| | | TCCCACCGAAGCCCAAGGACACTTTGATGATTTCCCGCACCCC |
| | | TGAAGTGACATGCGTGGTCGTGGACGTGTCACAGGAAGATCC |
| | | GGAGGTGCAGTTCAATTGGTACGTGGATGGCGTCGAGGTGCA |
| | | CAACGCCAAAACCAAGCCGAGGGAGGAGCAGTTCAACTCCAC |
| | | TTACCGCGTCGTGTCCGTGCTGACGGTGCTGCATCAGGACTGG |
| | | CTGAACGGGAAGGAGTACAAGTGCAAAGTGTCCAACAAGGGA |
| | | CTTCCTAGCTCAATCGAAAAGACCATCTCGAAAGCCAAGGGA |
| | | CAGCCCCGGGAACCCCAAGTGTATACCCTGCCACCGAGCCAG |
| | | GAAGAAATGACTAAGAACCAAGTCTCATTGACTTGCCTTGTGA |
| | | AGGGCTTCTACCCATCGGATATCGCCGTGGAATGGGAGTCCAA |
| | | CGGCCAGCCGGAAAACAACTACAAGACCACCCCTCCGGTGCT |
| | | GGACTCAGACGGATCCTTCTTCCTCTACTCGCGGCTGACCGTG |
| | | GATAAGAGCAGATGGCAGGAGGGAAATGTGTTCAGCTGTTCT |
| | | GTGATGCATGAAGCCCTGCACAACCACTACACTCAGAAGTCCC |
| | | TGTCCCTCTCCCTGGGA |

BAP058-Clone N LC

| | | |
|---|---|---|
| SEQ ID NO: 649 (Kabat) | LCDR1 | KASQDVGTAVA |
| SEQ ID NO: 650 (Kabat) | LCDR2 | WASTRHT |
| SEQ ID NO: 651 (Kabat) | LCDR3 | QQYNSYPLT |
| SEQ ID NO: 652 (Chothia) | LCDR1 | SQDVGTA |
| SEQ ID NO: 653 (Chothia) | LCDR2 | WAS |
| SEQ ID NO: 654 (Chothia) | LCDR3 | YNSYPL |
| SEQ ID NO: 664 | VL | DVVMTQSPLSLPVTLGQPASISCKASQDVGTAVAWYQQKPGQAP |
| | | RLLIYWASTRHTGVPSRFSGSGSGTEFTLTISSLQPDDFATYYCQQ |
| | | YNSYPLTFGQGTKVEIK |
| SEQ ID NO: 665 | DNA VL | GACGTCGTGATGACTCAGTCACCCCTGAGCCTGCCCGTGACCC |
| | | TGGGGCAGCCCGCCTCTATTAGCTGTAAAGCCTCTCAGGACGT |
| | | GGGCACCGCCGTGGCCTGGTATCAGCAGAAGCCAGGGCAAGC |
| | | CCCTAGACTGCTGATCTACTGGGCCTCTACTAGACACACCGGC |
| | | GTGCCCTCTAGGTTTAGCGGTAGCGGTAGTGGCACCGAGTTCA |
| | | CCCTGACTATCTCTTCACTGCAGCCCGACGACTTCGCTACCTAC |
| | | TACTGTCAGCAGTATAATAGCTACCCCCTGACCTTCGGTCAAG |
| | | GCACTAAGGTCGAGATTAAG |
| SEQ ID NO: 666 | Light | DVVMTQSPLSLPVTLGQPASISCKASQDVGTAVAWYQQKPGQAP |
| | chain | RLLIYWASTRHTGVPSRFSGSGSGTEFTLTISSLQPDDFATYYCQQ |
| | | YNSYPLTFGQGTKVEIKRTVAAPSVHFPPSDEQLKSGTASVVCLL |
| | | NNFYPREAKVQWKVDNALQSGNSQESVTEQDSKDSTYSLSSTLT |
| | | LSKADYEKFIKVYACEVTHQGLSSPVTKSFNRGEC |
| SEQ ID NO: 667 | DNA light | GACGTCGTGATGACTCAGTCACCCCTGAGCCTGCCCGTGACCC |
| | chain | TGGGGCAGCCCGCCTCTATTAGCTGTAAAGCCTCTCAGGACGT |
| | | GGGCACCGCCGTGGCCTGGTATCAGCAGAAGCCAGGGCAAGC |
| | | CCCTAGACTGCTGATCTACTGGGCCTCTACTAGACACACCGGC |
| | | GTGCCCTCTAGGTTTAGCGGTAGCGGTAGTGGCACCGAGTTCA |
| | | CCCTGACTATCTCTTCACTGCAGCCCGACGACTTCGCTACCTAC |
| | | TACTGTCAGCAGTATAATAGCTACCCCCTGACCTTCGGTCAAG |
| | | GCACTAAGGTCGAGATTAAGCGTACGGTGGCCGCTCCCAGCGT |
| | | GTTCATCTTCCCCCCCAGCGACGAGCAGCTGAAGAGCGGCACC |
| | | GCCAGCGTGGTGTGCCTGCTGAACAACTTCTACCCCCGGGAGG |
| | | CCAAGGTGCAGTGGAAGGTGGACAACGCCCTGCAGAGCGGCA |
| | | ACAGCCAGGAGAGCGTCACCGAGCAGGACAGCAAGGACTCCA |
| | | CCTACAGCCTGAGCAGCACCCTGACCCTGAGCAAGGCCGACT |
| | | ACGAGAAGCATAAGGTGTACGCCTGCGAGGTGACCCACCAGG |
| | | GCCTGTCCAGCCCCGTGACCAAGAGCTTCAACAGGGGCGAGT |
| | | GC |

BAP058-Clone O HC

| | | |
|---|---|---|
| SEQ ID NO: 668 (Kabat) | HCDR1 | agctactggatgtac |
| SEQ ID NO: 669 (Kabat) | HCDR2 | agaatcgaccctaatagcggctctactaagtataacgagaagtttaagaat |
| SEQ ID NO: 670 (Kabat) | HCDR3 | gactatagaaagggcctgtacgctatggactac |
| SEQ ID NO: 671 (Chothia) | HCDR1 | ggctacaccttcactagctac |
| SEQ ID NO: 672 (Chothia) | HCDR2 | gaccctaatagcggctct |
| SEQ ID NO: 670 (Chothia) | HCDR3 | gactatagaaagggcctgtacgctatggactac |

BAP058-Clone O LC

| | | |
|---|---|---|
| SEQ ID NO: 673 (Kabat) | LCDR1 | aaagcctctcaggacgtgggcaccgccgtggcc |
| SEQ ID NO: 674 (Kabat) | LCDR2 | tgggcctctactagacacacc |
| SEQ ID NO: 675 (Kabat) | LCDR3 | cagcagtataatagctaccccctgacc |
| SEQ ID NO: 676 (Chothia) | LCDR1 | tctcaggacgtgggcaccgcc |
| SEQ ID NO: 677 (Chothia) | LCDR2 | tgggcctct |
| SEQ ID NO: 678 (Chothia) | LCDR3 | tataatagctaccccctg |

BAP058-Clone N HC

| | | |
|---|---|---|
| SEQ ID NO: 668 (Kabat) | HCDR1 | agctactggatgtac |
| SEQ ID NO: 669 (Kabat) | HCDR2 | agaatcgaccctaatagcggctctactaagtataacgagaagtttaagaat |
| SEQ ID NO: 670 (Kabat) | HCDR3 | gactatagaaagggcctgtacgctatggactac |
| SEQ ID NO: 671 | HCDR1 | ggctacaccttcactagctac |
| (Chothia) | | |
| SEQ ID NO: 672 | HCDR2 | gaccctaatagcggctct |
| (Chothia) | | |
| SEQ ID NO: 670 | HCDR3 | gactatagaaagggcctgtacgctatggactac |
| (Chothia) | | |

BAP058-Clone N LC

| | | |
|---|---|---|
| SEQ ID NO: 673 (Kabat) | LCDR1 | aaagcctctcaggacgtgggcaccgccgtggcc |
| SEQ ID NO: 674 (Kabat) | LCDR2 | tgggcctctactagacacacc |
| SEQ ID NO: 675 (Kabat) | LCDR3 | cagcagtataatagctaccccctgacc |
| SEQ ID NO: 676 (Chothia) | LCDR1 | tctcaggacgtgggcaccgcc |
| SEQ ID NO: 677 (Chothia) | LCDR2 | tgggcctct |
| SEQ ID NO: 678 (Chothia) | LCDR3 | tataatagctaccccctg |

### Other Exemplary PD-L1 Inhibitors

[1007] In one embodiment, the anti-PD-L1 antibody molecule is Atezolizumab (Genentech/Roche), also known as MPDL3280A, RG7446, RO5541267, YW243.55.S70, or TECENTRIQ™. Atezolizumab and other anti-PD-L1 antibodies are disclosed in U.S. Pat. No. 8,217,149, incorporated by reference in its entirety. In one embodiment, the anti-PD-L1 antibody molecule comprises one or more of the CDR sequences (or collectively all of the CDR sequences), the heavy chain or light chain variable region sequence, or the heavy chain or light chain sequence of Atezolizuma, e.g., as disclosed in Table 26.

[1008] In one embodiment, the anti-PD-L1 antibody molecule is Avelumab (Merck Serono and Pfizer), also known as MSB0010718C. Avelumab and other anti-PD-L1 antibodies are disclosed in WO 2013/079174, incorporated by reference in its entirety. In one embodiment, the anti-PD-L1 antibody molecule comprises one or more of the CDR sequences (or collectively all of the CDR sequences), the heavy chain or light chain variable region sequence, or the heavy chain or light chain sequence of Avelumab, e.g., as disclosed in Table 26.

[1009] In one embodiment, the anti-PD-L1 antibody molecule is Durvalumab (MedImmune/AstraZeneca), also known as MEDI4736. Durvalumab and other anti-PD-L1 antibodies are disclosed in U.S. Pat. No. 8,779,108, incorporated by reference in its entirety. In one embodiment, the anti-PD-L1 antibody molecule comprises one or more of the CDR sequences (or collectively all of the CDR sequences), the heavy chain or light chain variable region sequence, or the heavy chain or light chain sequence of Durvalumab, e.g., as disclosed in Table26.

[1010] In one embodiment, the anti-PD-L1 antibody molecule is BMS-936559 (Bristol-Myers Squibb), also known as MDX-1105 or 12A4. BMS-936559 and other anti-PD-L1 antibodies are disclosed in U.S. Pat. No. 7,943,743 and WO 2015/081158, incorporated by reference in their entirety. In one embodiment, the anti-PD-L1 antibody molecule comprises one or more of the CDR sequences (or collectively all of the CDR sequences), the heavy chain or light chain variable region sequence, or the heavy chain or light chain sequence of BMS-936559, e.g., as disclosed in Table 26.

[1011] Further known anti-PD-L1 antibodies include those described, e.g., in WO 2015/181342, WO 2014/100079, WO 2016/000619, WO 2014/022758, WO 2014/055897, WO 2015/061668, WO 2013/079174, WO 2012/145493, WO 2015/112805, WO 2015/109124, WO 2015/195163, U.S. Pat. Nos. 8,168,179, 8,552,154, 8,460,927, and 9,175,082, incorporated by reference in their entirety.
[1012] In one embodiment, the anti-PD-L1 antibody is an antibody that competes for binding with, and/or binds to the same epitope on PD-L1 as, one of the anti-PD-L1 antibodies described herein.

TABLE 26
Amino acid sequences of other exemplary anti-PD-L1 antibody molecules
Atezolizumab

| | | |
|---|---|---|
| SEQ ID | Heavy | EVQLVESGGGLVQPGGSLRLSCAASGFTFSDSWIHWVRQAPGKGLEWVAWI |
| NO: 679 | chain | SPYGGSTYYADSVKGRFTISADTSKNTAYLQMNSLRAEDTAVYYCARRHWP |
| | | GGFDYWGQGTLVTVSSASTKGPSVFPLAPSSKSTSGGTAALGCLVKDYFPEP |
| | | VTVSWNSGALTSGVHTFPAVLQSSGLYSLSSVVTVPSSSLGTQTYICNVNIIKP |
| | | SNTKVDKKVEPKSCDKTHTCPPCPAPELLGGPSVFLFPPKPKDTLMISRTPEVT |
| | | CVVVDVSHEDPEVKFNWYVDGVEVHNAKTKPREEQYASTYRVVSVLTVLH |
| | | QDWLNGKEYKCKVSNKALPAPIEKTISKAKGQPREPQVYTLPPSREEMTKNQ |
| | | VSLTCLVKGFYPSDIAVEWESNGQPENNYKTTPPVLDSDGSFFLYSKLTVDKS |
| | | RWQQGNVFSCSVMHEALHNHYTQKSLSLSPGK |
| SEQ ID NO: | Light | DIQMTQSPSSLSASVGDRVTITCRASQDVSTAVAWYQQKPGKAPKLLIYSASF |
| 680 | chain | LYSGVPSRFSGSGSGTDFTLTISSLQPEDFATYYCQQYLYHPATFGQGTKVEIK |
| | | RTVAAPSVFIFPPSDEQLKSGTASVVCLLNNFYPREAKVQWKVDNALQSGNS |
| | | QESVTEQDSKDSTYSLSSTLTLSKADYEKHKVYACEVTHQGLSSPVTKSFNR |
| | | GEC |

Avelumab

| | | |
|---|---|---|
| SEQ ID NO: | Heavy | EVQLLESGGGLVQPGGSLRLSCAASGFTFSSYIMMWVRQAPGKGLEWVSSIY |
| 681 | chain | PSGGITFYADTVKGRFTISRDNSKNTLYLQMNSLRAEDTAVYYCARIKLGTV |
| | | TTVDYWGQGTLVTVSSASTKGPSVFPLAPSSKSTSGGTAALGCLVKDYFPEP |
| | | VTVSWNSGALTSGVHTFPAVLQSSGLYSLSSVVTVPSSSLGTQTYICNVNHKP |
| | | SNTKVDKKVEPKSCDKTHTCPPCPAPELLGGPSVFLFPPKPKDTLMISRTPEVT |
| | | CVVVDVSHEDPEVKFNWYVDGVEVHNAKTKPREEQYNSTYRVVSVLTVLH |
| | | QDWLNGKEYKCKVSNKALPAPIEKTISKAKGQPREPQVYTLPPSRDELTKNQ |
| | | VSLTCLVKGFYPSDIAVEWESNGQPENNYKTTPPVLDSDGSFFLYSKLTVDKS |
| | | RWQQGNVFSCSVMHEALHNHYTQKSLSLSPGK |
| SEQ ID NO: | Light | QSALTQPASVSGSPGQSITISCTGTSSDVGGYNYVSWYQQHPGKAPKLMIYD |
| 682 | chain | VSNRPSGVSNRFSGSKSGNTASLTISGLQAEDEADYYCSSYTSSSTRVFGTGT |
| | | KVTVLGQPKANPTVTLFPPSSEELQANKATLVCLISDFYPGAVTVAWKADGS |
| | | PVKAGVETTKPSKQSNNKYAASSYLSLTPEQWKSHRSYSCQVTHEGSTVEKT |
| | | VAPTECS |

Durvalumab

| | | |
|---|---|---|
| SEQ ID NO: | Heavy | EVQLVESGGGLVQPGGSLRLSCAASGFTFSRYWMSWVRQAPGKGLEWVANI |
| 683 | chain | KQDGSEKYYVDSVKGRFTISRDNAKNSLYLQMNSLRAEDTAVYYCAREGG |
| | | WFGELAFDYWGQGTLVTVSSASTKGPSVFPLAPSSKSTSGGTAALGCLVKDY |
| | | FPEPVTVSWNSGALTSGVHTFPAVLQSSGLYSLSSVVTVPSSSLGTQTYICNV |
| | | NHKPSNTKVDKRVEPKSCDKTHTCPPCPAPEFEGGPSVFLFPPKPKDTLMISR |
| | | TPEVTCVVVDVSHEDPEVKFNWYVDGVEVHNAKTKPREEQYNSTYRVVSV |
| | | LTVLHQDWLNGKEYKCKVSNKALPASIEKTISKAKGQPREPQVYTLPPSREE |
| | | MTKNQVSLTCLVKGFYPSDIAVEWESNGQPENNYKTTPPVLDSDGSFFLYSK |
| | | LTVDKSRWQQGNVFSCSVMHEALHNHYTQKSLSLSPGK |
| SEQ ID NO: | Light | EIVLTQSPGTLSLSPGERATLSCRASQRVSSSYLAWYQQKPGQAPRLLIYDAS |
| 684 | chain | SRATGIPDRFSGSGSGTDFTLTISRLEPEDFAVYYCQQYGSLPWTFGQGTKVEI |
| | | KRTVAAPSVFIFPPSDEQLKSGTASVVCLLNNFYPREAKVQWKVDNALQSGN |
| | | SQESVTEQDSKDSTYSLSSTLTLSKADYEKHKVYACEVTHQGLSSPVTKSFNR |
| | | GEC |

BMS-936559

| | | |
|---|---|---|
| SEQ ID | VH | QVQLVQSGAEVKKPGSSVKVSCKTSGDTFSTYAISWVRQAPGQGLEWMGGII |
| NO: 685 | | PIFGKAHYAQKFQGRVTITADESTSTAYMELSSLRSEDTAVYFCARKFHFVSG |
| | | SPFGMDVWGQGTTVTVSS |
| SEQ ID NO: | VL | EIVLTQSPATLSLSPGERATLSCRASQSVSSYLAWYQQKPGQAPRLLIYDASN |
| 686 | | RATGIPARFSGSGSGTDFTLTISSLEPEDFAVYYCQQRSNWPTFGQGTKVEIK |

[1013] Exemplary TGF-β Inhibitors

[1014] In certain embodiments, the combination of the ENTPD2 antibody or antigen binding fragment thereof as described herein and the CD73 antibody or antigen binding fragment thereof as described herein is administered in combination with a transforming growth factor beta (TGF-β) inhibitor. In some embodiments, the combination is used to treat a cancer, e.g., a cancer described herein.

[1015] TGF-β belongs to a large family of structurally-related cytokines including, e.g., bone morphogenetic proteins (BMPs), growth and differentiation factors, activins and inhibins. In some embodiments, the TGF-β inhibitors described herein can bind and/or inhibit one or more isoforms of TGF-β (e.g., one, two, or all of TGF-β1, TGF-β2, or TGF-β3).

[1016] In some embodiments, the TGF-β inhibitor is fresolimumab (CAS Registry Number: 948564-73-6). Fresolimumab is also known as GC1008. Fresolimumab is a human monoclonal antibody that binds to and inhibits TGF-beta isoforms 1, 2 and 3.

[1017] The heavy chain of fresolimumab has the amino acid sequence of:

(SEQ ID NO: 687)
QVQLVQSGAEVKKPGSSVKVSCKASGYTFSSNVISWVRQAPGQGLEWMG
GVIPIVDIANYAQRFKGRVTITADESTSTTYMELSSLRSEDTAVYYCAS
TLGLVLDAMDYWGQGTLVTVSSASTKGPSVFPLAPCSRSTSESTAALGC
LVKDYFPEPVTVSWNSGALTSGVHTFPAVLQSSGLYSLSSVVTVPSSSL
GTKTYTCNVDHKPSNTKVDKRVESKYGPPCPSCPAPEFLGGPSVFLFPP
KPKDTLMISRTPEVTCVVVDVSQEDPEVQFNWYVDGVEVHNAKTKPREE
QFNSTYRVVSVLTVLHQDWLNGKEYKCKVSNKGLPSSIEKTISKAKGQP
REPQVYTLPPSQEEMTKNQVSLTCLVKGFYPSDIAVEWESNGQPENNYK
TTPPVLDSDGSFFLYSRLTVDKSRWQEGNVFSCSVMHEALHNHYTQKSL
SLSLGK.

[1018] The light chain of fresolimumab has the amino acid sequence of:

(SEQ ID NO: 688)
ETVLTQSPGTLSLSPGERATLSCRASQSLGSSYLAWYQQKPGQAPRLLI
YGASSRAPGIPDRFSGSGSGTDFTLTISRLEPEDFAVYYCQQYADSPIT
FGQGTRLEIKRTVAAPSVFIFPPSDEQLKSGTASVVCLLNNFYPREAKV
QWKVDNALQSGNSQESVTEQDSKDSTYSLSSTLTLSKADYEKHKVYACE
VTHQGLSSPVTKSFNRGEC.

[1019] Fresolimumab is disclosed, e.g., in WO 2006/086469, U.S. Pat. Nos. 8,383,780, and 8,591,901.

[1020] In some embodiments, the TGF-β inhibitor is XOMA 089. XOMA 089 is also known as XPA.42.089. XOMA 089 is a fully human monoclonal antibody that binds and neutralizes TGF-beta 1 and 2 ligands.

[1021] The heavy chain variable region of XOMA 089 has the amino acid sequence of:

(SEQ ID NO: 689)
QVQLVQSGAEVKKPGSSVKVSCKASGGTFSSYAISWVRQAPGQGLEWMG
GIIPIFGTANYAQKFQGRVTITADESTSTAYMELSSLRSEDTAVYYCAR
GLWEVRALPSVYWGQGTLVTVSS(disclosed as SEQ ID
NO: 6 in WO 2012/167143).

[1022] The light chain variable region of XOMA 089 has the amino acid sequence of:

(SEQ ID NO: 690)
SYELTQPPSVSVAPGQTARITCGANDIGSKSVHWYQQKAGQAPVLVVSE
DIIRPSGIPERISGSNSGNTATLTISRVEAGDEADYYCQVWDRDSDQYV
FGTGTKVTVLG (disclosed as SEQ ID NO: 8 in
WO 2012/167143).

[1023] In certain embodiments, the combination includes an inhibitor of ENTPD2 (e.g., an anti-ENTPD2 antibody molecule described herein) and an inhibitor of CD73 (e.g., an anti-CD73 antibody molecule described herein) and a TGF-β inhibitor (e.g., a TGF-β inhibitor described herein).

[1024] In one embodiment, the combination includes a TGF-β inhibitor, XOMA 089, or a compound disclosed in PCT Publication No. WO 2012/167143, and an inhibitor of ENTPD2 (e.g., an anti-ENTPD2 antibody described herein) and an inhibitor of CD73 (e.g., an anti-CD73 antibody described herein).

[1025] In one embodiment, the TGF-β inhibitor, XOMA 089, or a compound disclosed in PCT Publication No. WO 2012/167143, is administered in combination with an inhibitor of ENTPD2 (e.g., an anti-ENTPD2 antibody described herein) and an inhibitor of CD73 (e.g., an anti-CD73 antibody molecule) to treat a cancer, wherein the cancer is MSS colorectal cancer (CRC), cholangiocarcinoma (intrahepatic or extrahepatic), pancreatic cancer, esophageal cancer, esophageal gastric junction (EGJ) cancer, or gastric cancer.

[1026] Adenosine A2A Receptor Antagonists

[1027] In certain embodiments, the combination of anti-human ENTPD2 molecules described herein and anti-CD73 molecules described herein are administered in combination with at least one adenosine A2A receptor (A2AR) antagonist as described below. In certain embodiments, the combination of anti-human ENTPD2 molecules described herein and anti-CD73 molecules described herein are administered in combination with at least two adenosine A2A receptor (A2AR) antagonists as described below. Exemplary A2AR antagonists include, but are not limited to, e.g., PBF509/NIR178 (Palobiofarma/Novartis), CPI444N81444 (Corvus/Genentech), AZD4635/HTL-1071 (AstraZeneca/Heptares), Vipadenant (Redox/Juno), GBV-2034 (Globavir), AB928 (Arcus Biosciences), Theophylline, Istradefylline (Kyowa Hakko Kogyo), Tozadenant/SYN-115 (Acorda), KW-6356 (Kyowa Hakko Kogyo), ST-4206 (Leadiant Biosciences), and Preladenant/SCH 420814 (Merck/Schering).

[1028] In certain embodiments, the A2AR antagonist is PBF509/NIR178, also just referred to as NIR178. PBF509/NIR178 and other A2AR antagonists are disclosed in U.S. Pat. No. 8,796,284 and WO 2017/025918, herein incorporated by reference in their entirety. In certain embodiments, the A2AR antagonist is 5-bromo-2,6-di-(1H-pyrazol-1-yl)pyrimidine-4-amine, or a pharmaceutically acceptable salt thereof. In certain embodiments, the A2AR antagonist has the following structure:

[chemical structure]

or a pharmaceuticaly acceptable salt thereof.

[1029] In certain embodiments, the A2AR antagonist is CPI444N81444. CPI-444 and other A2AR antagonists are disclosed in WO 2009/156737, herein incorporated by reference in its entirety. In certain embodiments, the A2AR antagonist is (S)-7-(5-methylfuran-2-yl)-3-((6-(((tetrahydrofuran-3-yl)oxy)methyl)pyridin-2-yl)methyl)-3H-[1,2,3]triazolo[4,5-d]pyrimidin-5-amine, or a pharmaceutically acceptbale salt thereof. In certain embodiments, the A2AR antagonist is (R)-7-(5-methylfuran-2-yl)-3-((6-(((tetrahydrofuran-3-yl)oxy)methyl)pyridin-2-yl)methyl)-3H-[1,2,3]triazolo[4,5-d]pyrimidin-5-amine, or racemate thereof, or a pharmaceutically acceptbale salt thereof. In certain embodiments, the A2AR antagonist is 7-(5-methylfuran-2-yl)-3-((6-(((tetrahydrofuran-3-yl)oxy)methyl)pyridin-2-yl)methyl)-3H-[1,2,3]triazolo[4,5-d]pyrimidin-5-amine, or a pharmaceutically acceptbale salt thereof. In certain embodiments, the A2AR antagonist has the following structure:

[chemical structure]

or a pharmaceuticaly acceptable salt thereof.

[1030] In certain embodiments, the A2AR antagonist is AZD4635/HTL-1071. A2AR antagonists are disclosed in WO 2011/095625, herein incorporated by reference in its entirety. In certain embodiments, the A2AR antagonist is 6-(2-chloro-6-methylpyridin-4-yl)-5-(4-fluorophenyl)-1,2,4-triazin-3-amine, or a pharmaceuticaly acceptable salt thereof. In certain embodiments, the A2AR antagonist has the following structure:

[chemical structure]

or a pharmaceuticaly acceptable salt thereof.

[1031] In certain embodiments, the A2AR antagonist is ST-4206 (Leadiant Biosciences). In certain embodiments, the A2AR antagonist is an A2AR antagonist described in U.S. Pat. No. 9,133,197, herein incorporated by reference in its entirety. In certain embodiments, the A2AR antagonist has the following structure:

[chemical structure]

or a pharmaceuticaly acceptable salt thereof.

[1032] In certain embodiments, the A2AR antagonist is an A2AR antagonist described in U.S. Pat. Nos. 8,114,845, 9,029,393, US20170015758, or US20160129108, herein incorporated by reference in their entirety.

[1033] In certain embodiments, the A2AR antagonist is istradefylline (CAS Registry Number: 155270-99-8). Istradefylline is also known as KW-6002 or 8-[(E)-2-(3,4-dimethoxyphenyl)vinyl]-1,3-diethyl-7-methyl-3,7-dihydro-1H-purine-2,6-dione. Istradefylline is disclosed, e.g., in LeWitt et al. (2008) Annals of Neurology 63 (3): 295-302).

[1034] In certain embodiments, the A2aR antagonist is tozadenant (Biotie). Tozadenant is also known as SYN115 or 4-hydroxy-N-(4-methoxy-7-morpholin-4-yl-1,3-benzothiazol-2-yl)-4-me thylpiperidine-1-carboxamide. Tozadenant blocks the effect of endogenous adenosine at the A2a receptors, resulting in the potentiation of the effect of dopamine at the D2 receptor and inhibition of the effect of glutamate at the mGluR5 receptor. In some embodiments, the A2aR antagonist is preladenant (CAS Registry Number: 377727-87-2). Preladenant is also known as SCH 420814 or 2-(2-Furanyl)-7-[2-[4-[4-(2-methoxyethoxy)phenyl]-1-piperazinyl]ethyl]7H-pyrazolo[4,3-e][1,2,4]triazolo[1,5-c]pyrimidine-5-amine. Preladenant was developed as a drug that acted as a potent and selective antagonist at the adenosine A2A receptor.

[1035] In certain embodiments, the A2aR antagonist is vipadenant. Vipadenant is also known as BIIB014, V2006, or 3-[(4-amino-3-methylphenyl)methyl]-7-(furan-2-yl)triazolo[4,5-d]pyrimidin-5-amine.

[1036] Other exemplary A2aR antagonists include, e.g., ATL-444, MSX-3, SCH-58261, SCH-412,348, SCH-442,416, VER-6623, VER-6947, VER-7835, CGS-15943, or ZM-241,385.

[1037] Sample Preparation

[1038] Samples used in the methods described herein can be obtained from a subject using any one of the methods known in the art, e.g., by biopsy or surgery. The sample may be flash frozen and stored at −80° C. for later use. The sample may also be fixed with a fixative, such as formaldehyde, paraformaldehyde, or acetic acid/ethanol. RNA or protein may be extracted from a fresh, frozen or fixed sample for analysis.

### Pharmaceutical Compositions, Dosage, and Methods of Administration

[1039] An embodiment of the invention relates to compositions, e.g., pharmaceutical compositions, for use in treatment of a ENTPD2-associated disease, e.g., a cancer as described herein. Such compositions include a combination of an anti-ENTPD2 antibody or antigen binding fragment thereof as described herein and an anti-CD73 antibody or antigen binding fragment thereof as described herein, nucleic acids encoding such antibodies or antigen binding fragments, or vector(s) comprising a nucleic acid(s) encoding such antibodies or antigen binding fragments. Such compositions can optionally further include another agent, e.g., a current standard of care for the disease to be treated.

[1040] Pharmaceutical compositions typically include a pharmaceutically acceptable carrier. As used herein the language “pharmaceutically acceptable carrier” includes saline, solvents, dispersion media, coatings, antibacterial and antifungal agents, isotonic and absorption delaying agents, and the like, compatible with pharmaceutical administration. Pharmaceutical compositions are typically formulated to be compatible with its intended route of administration. Examples of routes of administration include parenteral (e.g., intravenous, intraarterial, intraperitoneal), intracranial, intrathecal, or intranasal (e.g., inhalation), intradermal, subcutaneous, or intratumor administration.

[1041] The phrase “pharmaceutically acceptable” is employed herein to refer to those compounds, materials, compositions, and/or dosage forms which are, within the scope of sound medical judgment, suitable for use in contact with the tissues of human beings and animals without excessive toxicity, irritation, allergic response, or other problem or complication, commensurate with a reasonable benefit/risk ratio.

[1042] In some embodiments, the pharmaceutical compositions comprise one or more pharmaceutically acceptable carriers, including, e.g., ion exchangers, alumina, aluminum stearate, lecithin, serum proteins, such as human serum albumin, buffer substances such as phosphates, glycine, sorbic acid, potassium sorbate, partial glyceride mixtures of saturated vegetable fatty acids, water, salts or electrolytes, such as protamine sulfate, disodium hydrogen phosphate, potassium hydrogen phosphate, sodium chloride, zinc salts, colloidal silica, magnesium trisilicate, polyvinyl pyrrolidone, cellulose-based substances, polyethylene glycol, sodium carboxymethylcellulose, polyacrylates, waxes, polyethylene-polyoxypropylene-block polymers, polyethylene glycol, and wool fat.

[1043] Methods of formulating suitable pharmaceutical compositions are known in the art, see, e.g., Remington: The Science and Practice of Pharmacy. 21st ed., 2005; and the books in the series Drugs and the Pharmaceutical Sciences: a Series of Textbooks and Monographs (Dekker, N.Y.). For example, solutions or suspensions used for parenteral or subcutaneous application can include the following components: a sterile diluent such as water for injection, saline solution, fixed oils, polyethylene glycols, glycerin, propylene glycol or other synthetic solvents; antibacterial agents such as benzyl alcohol or methyl parabens; antioxidants such as ascorbic acid or sodium bisulfate; chelating agents such as ethylenediaminetetraacetic acid; buffers such as acetates, citrates or phosphates and agents for the adjustment of tonicity such as sodium chloride or dextrose. pH can be adjusted with acids or bases, such as hydrochloric acid or sodium hydroxide. The preparation can be enclosed in ampoules, disposable syringes or multiple dose vials made of glass or plastic.

[1044] Pharmaceutical compositions suitable for injectable use can include sterile aqueous solutions (where water soluble) or dispersions and sterile powders, for the extemporaneous preparation of sterile injectable solutions or dispersion. For intravenous administration, suitable carriers include physiological saline, bacteriostatic water, Cremophor EL™ (BASF, Parsippany, N.J.) or phosphate buffered saline (PBS). In all cases, the composition must be sterile and should be fluid to the extent that easy syringability exists. It should be stable under the conditions of manufacture and storage and must be preserved against the contaminating action of microorganisms such as bacteria and fungi. The carrier can be a solvent or dispersion medium containing, for example, water, ethanol, polyol (for example, glycerol, propylene glycol, and liquid polyethylene glycol, and the like), and suitable mixtures thereof. The proper fluidity can be maintained, for example, by the use of a coating such as lecithin, by the maintenance of the required particle size in the case of dispersion and by the use of surfactants. Prevention of the action of microorganisms can be achieved by various antibacterial and antifungal agents, for example, parabens, chlorobutanol, phenol, ascorbic acid, thimerosal, and the like. In many cases, it will be preferable to include isotonic agents, for example, sugars, polyalcohols such as mannitol, sorbitol, sodium chloride in the composition. Prolonged absorption of the injectable compositions can be brought about by including in the composition an agent that delays absorption, for example, aluminum monostearate and gelatin.

[1045] Sterile injectable solutions can be prepared by incorporating the active compound in the required amount in an appropriate solvent with one or a combination of ingredients enumerated above, as required, followed by filtered sterilization.

[1046] Generally, dispersions are prepared by incorporating the active compound into a sterile vehicle, which contains a basic dispersion medium and the required other ingredients from those enumerated above. In the case of sterile powders for the preparation of sterile injectable solutions, the preferred methods of preparation are vacuum drying and freeze-drying, which yield a powder of the active ingredient plus any additional desired ingredient from a previously sterile-filtered solution thereof.

[1047] Parenteral formulations can be a single bolus dose, an infusion or a loading bolus dose followed with a maintenance dose. These compositions can be administered at specific fixed or variable intervals, e.g., once a day, or on an “as needed” basis.

[1048] A suitable pharmaceutical composition for injection can comprise a buffer (e.g., acetate, phosphate or citrate buffer), a surfactant (e.g., polysorbate), optionally a stabilizer agent (e.g., human albumin), etc. Preparations for peripheral administration include sterile aqueous or non-aqueous solutions, suspensions, and emulsions. Examples of non-aqueous solvents are propylene glycol, polyethylene glycol, vegetable oils such as olive oil, and injectable organic esters such as ethyl oleate. Aqueous carriers include, e.g., water, alcoholic/aqueous solutions, emulsions or suspensions, including saline and buffered media. In some embodiments, the pharmaceutical composition comprises 0.01-0.1 M phosphate buffer or 0.8% saline. Other common parenteral vehicles include sodium phosphate solutions, Ringer's dextrose, dextrose and sodium chloride, lactated Ringer's, or fixed oils. Intravenous vehicles include fluid and nutrient replenishers, electrolyte replenishers, such as those based on Ringer's dextrose, and the like. Preservatives and other additives can also be present such as, for example, antimicrobials, antioxidants, chelating agents, and inert gases and the like.

[1049] In one embodiment, the therapeutic compounds are prepared with carriers that will protect the therapeutic compounds against rapid elimination from the body, such as a controlled release formulation, including implants and microencapsulated delivery systems.

[1050] The pharmaceutical compositions can be included in a container, pack, or dispenser together with instructions for administration.

[1051] Dosage, toxicity and therapeutic efficacy of the therapeutic compounds can be determined by standard pharmaceutical procedures in cell cultures or experimental animals, e.g., for determining the LD50 (the dose lethal to 50% of the population) and the ED50 (the dose therapeutically effective in 50% of the population). The dose ratio between toxic and therapeutic effects is the therapeutic index and it can be expressed as the ratio LD50/ED50. Compounds which exhibit high therapeutic indices are preferred. While compounds that exhibit toxic side effects may be used, care should be taken to design a delivery system that targets such compounds to the site of affected tissue in order to minimize potential damage to uninfected cells and, thereby, reduce side effects.

[1052] The data obtained from cell culture assays and animal studies can be used in formulating a range of dosage for use in humans. The dosage of such compounds lies preferably within a range of circulating concentrations that include the ED50 with little or no toxicity. The dosage may vary within this range depending upon the dosage form employed and the route of administration utilized. For any compound used in the method of the invention, the therapeutically effective dose can be estimated initially from cell culture assays. A dose may be formulated in animal models to achieve a circulating plasma concentration range that includes the IC50 (i.e., the concentration of the test compound which achieves a half-maximal inhibition of symptoms) as determined in cell culture. Such information can be used to more accurately determine useful doses in humans. Levels in plasma may be measured, for example, by high performance liquid chromatography.

### Kits

[1053] Also provided herein are kits including one or more of the compositions provided herein and instructions for use. Instructions for use can include instructions for diagnosis or treatment of a ENTPD2-associated disease, e.g., a cancer, as described herein. Kits as provided herein can be used in accordance with any one of the methods described herein. Those skilled in the art will be aware of other suitable uses for kits provided herein, and will be able to employ the kits for such uses. Kits as provided herein can also include a mailer (e.g., a postage paid envelope or mailing pack) that can be used to return the sample for analysis, e.g., to a laboratory. The kit can include one or more containers for the sample, or the sample can be in a standard blood collection vial. The kit can also include one or more of an informed consent form, a test requisition form, and instructions on how to use the kit in a method described herein. Methods for using such kits are also included herein. One or more of the forms (e.g., the test requisition form) and the container holding the sample can be coded, for example, with a bar code for identifying the subject who provided the sample.

[1054] One skilled in the art will recognize many methods and materials similar or equivalent to those described herein, which could be used in the practice of the present invention. Indeed, the present invention is in no way limited to the methods and materials described.

### EXAMPLES

[1055] While specific embodiments of the subject invention have been discussed, the above specification is illustrative and not restrictive. Many variations of the invention will become apparent to those skilled in the art upon review of this specification and the claims below. The full scope of the invention should be determined by reference to the claims, along with their full scope of equivalents, and the specification, along with such variations. The invention is further described in the following examples, which do not limit the scope of the invention described in the claims.

### Example 1

### Expression of ENTPD2 in Cancer

[1056] Ectonucleoside triphosphate diphosphohydrolase 2 (also referred to as ENTPD2, NTPDase 2, NTPDase-2, Ecto-ATPase 2, Ecto-ATPDase 2, CD39 Antigen-like 1, CD39L1, ecto-ATP-Diphosphohydrolase 2) belongs to a family of extracellular ATP hydrolases that regulate purinergic signaling, specifically ATP, UTP, as well as ADP and UDP in the extracellular space (for review see Robson et al Purinergic Signaling 2:409-430 (2006)). End product of ATP/ADP hydrolysis 5′AMP is subsequently dephosphorylated to adenosine by the ecto-5′-nucleotidase (also known as Ecto5′Ntase or CD73).

[1057] The functional role of ENTPD2 in cancer has not been well described. Early reports focused on ENTPD2 overexpression in a rat glioma model which led to enhanced in vivo tumor growth through ADP-mediated modulation of platelets and the tumor microenvironment, as well as promoted an inflammatory state potentiating tumor spread (Braganhol et al Cancer Sci 100(8): 1434-42 (2009); Braganhol et al Purinergic Signal 8(2):235-43 (2012)). More recently elevated expression of ENTPD2 was reported in hepatocellular carcinoma, where its expression was associated with worse prognosis due to enhanced myeloid-derived suppressor cell accumulation/maintenance (Chiu et al Nature Communications 8(1): 517 (2017)).

[1058] Although the functional characterization of ENTPD2 in cancer is limited in the public domain, the purinergic mediators such as ATP and adenosine, released into the extracellular space, have been shown to play important role in immunity and inflammation. ATP released from stressed, damaged or apoptotic cells triggers rapid inflammation via activation of P2RX and P2RY receptors that enhance recruitment of immune cells, potentiate TCR signaling in T cells and promote dendritic and macrophage cell activation. On the other hand, adenosine signaling results in an immunosuppressive niche through inhibition of effector T cells, as well as deregulation of mononuclear phagocyte cells (for reviews see Cekic et al Nature Reviews Immunology 16: 177-192 (2016), Antonioli et al Nature Reviews Cancer 13: 842-857 (2013)). Pre-clinically blockade of adenosine signaling or restoration of extracellular ATP at the tumor site have demonstrated to induce lymphocyte recruitment and anti-tumor responses (Michaud et al Science 334(6062): 1573-7 (2011); Allard et al Clinical Cancer Research 19(20): 5626-35 (2013)).

[1059] Elevated expression of ENTPD2 in cancer cells has the potential to dramatically alter the balance of purinergic signaling in the tumor microenvironment, shifting it towards a more immunosuppressive state. Targeted inhibition of ENTPD2 catalytic function can therefore provide an opportunity to shift the balance towards an ATP-driven pro-inflammatory Th-1 like state, potentiating anti-tumor immune response.

[1060] ENTPD2 expression has not been carefully examined across different tumor subtypes. Anti-human ENTPD2 mAb1 was used to assess ENTPD2 expression across cancer cell lines from different indications. Cells were stained with Anti-human ENTPD2 mAb1 at 5 μg/ml for 45 min on ice, followed by an incubation with goat anti-human IgG, Fcγ specific, Alexa Fluor 647 or APC conjugated secondary Ab (1:400 dilution; Jackson ImmunoResearch Laboratories, West Grove, Pa.). All incubations and washes were performed in FACS Buffer composed of 1× HyClone Phosphate Buffered Saline (GE Healthcare, Pittsburg, Pa.), 1% HyClone Fetal Bovine Serum (GE Healthcare, Pittsburg, Pa.), 2 mM EDTA (ThermoFisher, Waltham Mass.).

[1061] Elevated expression of ENTPD2 was observed in representative cancer cell lines from colorectal, esophageal, gastric, breast and lung cancer indications as shown in FIG. 1A. ENTPD2 receptor density was quantified using the Quantum Simply Cellular anti-Human IgG from Bangs Laboratories (Fishers, Ind.) according to manufacturer's directions (Table 20, FIG. 1B).

[1062] In order to assess ENTPD2 protein expression in primary tumor tissues, formalin-fixed paraffin-embedded tumor tissue microarrays with matched adjacent normal tissues were obtained from Cureline (Brisbane, Calif.). IHC staining was performed with the anti-CD39L1/ENTPD2 IHC Ab (NBP1-85752, Novus, Littleton, Colo.) using an automated Ventana protocol with standard high pH CC1 antigen retrieval at 95° C., and followed by incubations with Ventana DISCOVERY® OmniMap anti-Rb HRP secondary Ab and Ventana DISCOVERY® ChromoMap DAB Kit (Ventana, Tuscon Ariz.).

[1063] Elevated ENTPD2 expression, localized to the cell membrane, was observed in subsets of colorectal, esophageal and ovarian tumor samples. None or very low background levels of ENTPD2 expression was detected in the matched normal tissue sections (FIG. 2).

### Example 2

### Generation of Humanized Monoclonal Antibodies that Bind to Human ENTPD2

### Generation of Expression Constructs for Human, Rat, Mouse and Cynomolgus Monkey ENTPD2

[1064] Nucleotide sequences encoding full-length ENTPD2 from human, cynomolgus macaque (cyno), rat and mouse as well as ENTPD1 (CD39) from human and mouse were synthesized based on amino acid sequences from the GenBank® or UniProtKB databases (see Table 9). All synthesized DNA fragments were cloned into appropriate expression vectors.

TABLE 9
Sequences of reagents used for generating anti-ENTPD2 antibody
Human ENTPD2: NP_982293

| | |
|---|---|
| SEQ ID NO: 291 | MAGKVRSLLPPLLLAAAGLAGLLLLCVPTRDVREPPALKYGIVL |
| | DAGSSHTSMFIYKWPADKENDTGIVGQHSSCDVPGGGISSYADN |
| | PSGASQSLVGCLEQALQDVPKERHAGTPLYLGATAGMRLLNLTN |
| | PEASTSVLMAVTHTLTQYPFDFRGARILSGQEEGVFGWVTANYL |
| | LENFIKYGWVGRWFRPRKGTLGAMDLGGASTQITFETTSPAEDR |
| | ASEVQLHLYGQHYRVYTHSFLCYGRDQVLQRLLASALQTHGFH |
| | PCWPRGFSTQVLLGDVYQSPCTMAQRPQNFNSSARVSLSGSSDP |
| | HLCRDLVSGLFSFSSCPFSRCSFNGVFQPPVAGNFVAFSAFFYTVD |
| | FLRTSMGLPVATLQQLEAAAVNVCNQTWAQLQARVPGQRARLA |
| | DYCAGAMFVQQLLSRGYGFDERAFGGVIFQKKAADTAVGWAL |
| | GYMLNLTNLIPADPPGLRKGTDFSSWVVLLLLFASALLAALVLLL |
| | RQVHSAKLPSTI |
| SEQ ID NO: 342 | ATGGCCGGGAAGGTGCGGTCACTGCTGCCGCCGCTGCTGCTG |
| | GCCGCCGCGGGCCTCGCCGGCCTCCTACTGCTGTGCGTCCCCA |
| | CCCGCGACGTCCGGGAGCCGCCCGCCCTCAAGTATGGCATCGT |
| | CCTGGACGCTGGTTCTTCACACACGTCCATGTTTATCTACAAG |
| | TGGCCGGCAGACAAGGAGAACGACACAGGCATTGTGGGCCAG |
| | CACAGCTCCTGTGATGTTCCAGGTGGGGGCATCTCCAGCTATG |
| | CAGACAACCCTTCTGGGGCCAGCCAGAGTCTTGTTGGATGCCT |
| | CGAACAGGCGCTTCAGGATGTGCCCAAAGAGAGACACGCGGG |
| | CACACCCCTCTACCTGGGAGCCACAGCGGGTATGCGCCTGCTC |
| | AACCTGACCAATCCAGAGGCCTCGACCAGTGTGCTCATGGCA |
| | GTGACTCACACACTGACCCAGTACCCCTTTGACTTCCGGGGTG |
| | CACGCATCCTCTCGGGCCAGGAAGAGGGGGTGTTTGGCTGGG |
| | TGACTGCCAACTACCTGCTGGAGAACTTCATCAAGTACGGCTG |
| | GGTGGGCCGGTGGTTCCGGCCACGGAAGGGGACACTGGGGGC |
| | CATGGACCTGGGGGGTGCCTCTACCCAGATCACTTTTGAGACA |
| | ACCAGTCCAGCTGAGGACAGAGCCAGCGAGGTCCAGCTGCAT |
| | CTCTACGGCCAGCACTACCGAGTCTACACCCACAGCTTCCTCT |
| | GCTATGGCCGTGACCAGGTCCTCCAGAGGCTGCTGGCCAGCG |
| | CCCTCCAGACCCACGGCTTCCACCCCTGCTGGCCGAGGGGCTT |
| | TTCCACCCAAGTGCTGCTCGGGGATGTGTACCAGTCACCATGC |
| | ACCATGGCCCAGCGGCCCCAGAACTTCAACAGCAGTGCCAGG |
| | GTCAGCCTGTCAGGGAGCAGTGACCCCCACCTCTGCCGAGATC |
| | TGGTTTCTGGGCTCTTCAGCTTCTCCTCCTGCCCCTTCTCCCGA |
| | TGCTCTTTCAATGGGGTCTTCCAGCCCCCAGTGGCTGGGAACT |
| | TTGTGGCCTTCTCTGCCTTCTTCTACACTGTGGACTTTTTGCGG |
| | ACTTCGATGGGGCTGCCCGTGGCCACCCTGCAGCAGCTGGAG |
| | GCAGCCGCAGTGAATGTCTGCAACCAGACCTGGGCTCAGCTG |
| | CAAGCTCGGGTGCCAGGGCAACGGGCCCGCCTGGCCGACTAC |
| | TGCGCCGGGGCCATGTTCGTGCAGCAGCTGCTGAGTCGCGGCT |
| | ACGGCTTCGACGAGCGCGCCTTCGGCGGCGTGATCTTCCAGAA |
| | GAAGGCCGCGGACACTGCAGTGGGCTGGGCGCTCGGCTACAT |
| | GCTGAACCTGACCAACCTGATCCCCGCCGACCCGCCGGGGCT |
| | GCGCAAGGGCACAGACTTCAGCTCCTGGGTCGTCCTCCTGCTG |
| | CTCTTCGCCTCCGCGCTCCTGGCTGCGCTTGTCCTGCTGCTGCG |
| | TCAGGTGCACTCCGCCAAGCTGCCAAGCACCATT |

CynoENTPD2: XP_005580409

| | |
|---|---|
| SEQ ID NO: 343 | MAGKVRSLLPPLLLAAAGLAGLLLLCVPTRDIREPPALKYGIVLD |
| | AGSSHTSMFIYKWPADKENDTGIVGQHSSCDVPGGGISSYADNPS |
| | GAGQSLVGCLEQALRDVPKERHAGTPLYLGATAGMRLLNLTNP |
| | EASTSVLTAVTHTLTQYPFDFRGARILSGQEEGVFGWVTANYLLE |
| | NFIKYGWVGRWFRPRKGTLGAMDLGGASTQITFETTSPAEDRAS |
| | EVQLRLYGQHYRVYTHSFLCYGRDQVLQRLLASALQTHSFHPC |
| | WPRGFSTHVLLGDVYQSPCTVAQRPQTFNSSARVSLSGSSDPHLC |
| | RDLVSGLFSFSSCPFSRCSFNGVFQPPVAGNFIAFSAFFYTVNFLRT |
| | SMGLPVATLQQLEAAAVNVCNQTWAQLQARVPGQQAHLADYC |
| | AGAMFVQQLLSRGYGFDERAFGGVIFQKKAADTAVGWALGYM |
| | LNLTNLIPADPPGLRKGTDFSSWVVLLLLFASALLAALVLLLHQV |
| | HSAKLPSTI |
| SEQ ID NO: 344 | ATGGCCGGGAAGGTGCGGTCACTGCTGCCGCCGCTGCTGCTG |
| | GCCGCCGCGGGCCTCGCCGGCCTCCTACTGCTGTGCGTGCCCA |
| | CCAGGGACATTAGGGAGCCTCCCGCTCTGAAATACGGCATCG |
| | TGCTGGACGCCGGAAGCAGCCACACCTCCATGTTCATCTACAA |
| | GTGGCCCGCCGACAAGGAGAACGACACAGGCATCGTGGGCCA |
| | GCATAGCTCCTGCGACGTGCCTGGAGGCGGCATCTCCAGCTAC |
| | GCCGACAATCCTTCCGGCGCTGGACAGTCCCTGGTGGGATGTC |
| | TGGAGCAGGCCCTGAGGGACGTGCCTAAGGAGAGACACGCCG |
| | GCACCCCTCTGTACCTGGGAGCCACAGCCGGCATGAGACTCCT |
| | GAATCTGACCAACCCTGAGGCCTCCACCTCCGTCCTGACAGCC |
| | GTGACACATACCCTGACCCAGTACCCCTTCGATTTCAGGGGAG |
| | CCAGAATACTGAGCGGCCAGGAAGAAGGCGTGTTCGGATGGG |
| | TGACCGCCAACTACCTCCTGGAGAACTTCATCAAGTACGGCTG |
| | GGTGGGCAGGTGGTTTAGACCCAGGAAGGGCACCCTGGGAGC |
| | TATGGATCTGGGCGGAGCTTCCACACAGATCACCTTCGAGACC |
| | ACCTCCCCCGCTGAGGACAGAGCCTCCGAGGTGCAGCTGAGG |
| | CTGTACGGCCAGCATTACAGGGTGTATACACACAGCTTCCTGT |
| | GCTACGGCAGGGACCAGGTCCTGCAGAGACTGCTCGCTTCCG |
| | CCCTGCAGACCCACTCCTTCCACCCTTGCTGGCCTAGGGGCTT |
| | TAGCACCCATGTGCTCCTGGGAGATGTGTACCAGAGCCCCTGC |
| | ACCGTGGCCCAAAGACCCCAGACCTTTAACTCCTCCGCTAGAG |
| | TGAGCCTGAGCGGCAGCTCCGATCCCCACCTGTGTAGGGACCT |
| | GGTCAGCGGACTGTTCAGCTTCAGCAGCTGCCCTTTCAGCAGG |
| | TGCAGCTTCAATGGCGTGTTCCAGCCTCCCGTGGCCGGCAACT |
| | TCATCGCTTTCTCCGCCTTCTTCTACACCGTCaACTTTCTGAGG |
| | ACAAGCATGGGACTGCCCGTGGCTACCCTCCAACAACTGGAG |
| | GCCGCCGCCGTGAACGTGTGCAACCAGACATGGGCCCAACTG |
| | CAGGCTAGGGTGCCCGGCCAACAGGCCCATCTGGCTGACTAC |
| | TGTGCCGGCGCCATGTTCGTGCAGCAGCTGCTGAGCAGGGGCT |
| | ATGGATTCGACGAGAGGGCCTTCGGCGGCGTCATCTTCCAAA |
| | AGAAGGCCGCCGATACAGCCGTGGGCTGGGCTCTGGGCTACA |
| | TGCTGAACCTGACAAACCTGATCCCCGCTGACCCCCCCGGACT |
| | GAGGAAGGGAACCGATTTCAGCAGCTGGGTCGTGCTCCTGCT |
| | GCTGTTTGCTAGCGCCCTGCTCGCCGCTCTGGTGCTGCTGCTG |
| | CACCAGGTGCACTCCGCCAAGCTGCCCAGCACCATT |

Mouse ENTPD2: NP_033979

| | |
|---|---|
| SEQ ID NO: 345 | MAGKLVSLVPPLLLAAVGLAGLLLLCVPTQDVREPPALKYGIVL |
| | DAGSSHTSMFVYKWPADKENDTGIVGQHSSCDVRGGGISSYAN |
| | DPSRAGQSLVECLEQALRDVPKDRYASTPLYLGATAGMRLLNLT |
| | SPEATAKVLEAVTQTLTRYPFDFRGARILSGQDEGVFGWVTANY |
| | LLENFIKYGWVGRWIRPRKGTLGAMDLGGASTQITFETTSPSEDP |
| | DNEVHLRLYGQHYRVYTHSFLCYGRDQVLQRLLASALQIHRFHP |
| | CWPKGYSTQVLLREVYQSPCTMGQRPQTFNSSATVSLSGTSNAA |
| | LCRDLVSGLFNISSCPFSQCSFNGVFQPPVAGNFIAFSAFYYTVDF |
| | LKTVMGLPVGTLKQLEDATETTCNQTWAELQARVPGQQTRLPD |
| | YCAVAMFIHQLLSRGYRFDERSFRGVVFEKKAADTAVGWALGY |
| | MLNLTNLIPADLPGLRKGTHFSSWVALLLLFTVLILAALVLLLRQ |
| | VRSAKSPGAL |
| SEQ ID NO: 346 | ATGGCTGGAAAGTTGGTGTCACTGGTGCCACCCCTGCTGCTGG |
| | CTGCCGTGGGCCTCGCCGGCCTCCTGCTACTGTGCGTCCCTAC |
| | CCAAGACGTCCGGGAGCCGCCCGCCCTCAAGTATGGCATCGTT |
| | CTGGATGCTGGCTCTTCACACACATCCATGTTTGTCTACAAGT |
| | GGCCAGCGGACAAGGAAAATGACACAGGTATCGTGGGCCAGC |
| | ACAGCTCTTGCGATGTTCGAGGTGGTGGCATCTCCAGCTACGC |
| | AAATGACCCTTCTAGGGCAGGCCAGAGTCTGGTTGAATGTCTT |
| | GAACAGGCACTTCGGGATGTGCCCAAAGACAGATATGCCAGC |
| | ACTCCACTCTACCTGGGAGCTACAGCAGGCATGCGCCTACTCA |
| | ACCTGACCAGCCCAGAGGCCACAGCCAAGGTGCTGGAGGCAG |
| | TGACACAGACGCTCACACGGTACCCCTTTGACTTCCGTGGTGC |
| | CCGCATCCTCTCGGGACAGGATGAAGGGGTGTTTGGCTGGGT |
| | GACTGCCAACTACCTGCTGGAGAACTTCATCAAGTATGGCTGG |
| | GTAGGCCGGTGGATACGGCCAAGGAAGGGAACTCTGGGGGCC |
| | ATGGACCTTGGGGGTGCCTCAACACAGATCACCTTTGAGACA |
| | ACCAGTCCATCTGAAGATCCAGATAATGAGGTCCATTTGCGGC |
| | TCTATGGCCAGCATTACCGTGTCTACACCCATAGCTTCCTCTG |
| | CTATGGCCGGGACCAGGTTCTCCAGAGGCTTCTGGCCAGTGCC |
| | CTCCAGATCCATCGCTTCCACCCCTGCTGGCCAAAGGGCTACT |
| | CCACCCAAGTGCTGCTCCGGGAAGTCTACCAGTCTCCATGCAC |
| | TATGGGTCAGCGTCCCCAGACCTTCAACAGCAGTGCCACTGTC |
| | AGCCTGTCAGGGACCAGCAACGCTGCCCTCTGTCGTGACCTCG |
| | TCTCTGGGCTCTTCAATATCTCCTCCTGTCCCTTTTCCCAATGC |
| | TCCTTCAATGGGGTTTTCCAGCCTCCCGTGGCTGGGAACTTCA |
| | TAGCCTTTTCTGCTTTCTACTATACTGTAGACTTCCTGAAGACA |
| | GTGATGGGGCTGCCTGTGGGAACCCTGAAGCAGCTGGAGGAT |
| | GCCACAGAGACCACCTGCAACCAGACCTGGGCTGAGCTTCAG |
| | GCCCGAGTACCCGGACAGCAGACCCGCCTGCCTGACTACTGC |
| | GCTGTAGCCATGTTCATACATCAGCTATTGAGCCGCGGTTATC |
| | GCTTCGACGAGCGCTCTTTCCGTGGAGTGGTCTTCGAAAAGAA |
| | GGCGGCAGACACGGCTGTCGGCTGGGCGCTGGGCTACATGCT |
| | GAATTTGACCAACCTGATTCCCgctgacctcccgggactacgtaagggcacccac |
| | TTCAGCTCCTGGGTTGCTCTCCTGCTGCTCTTCACAGTCCTGAT |
| | CTTGGCGGCTTTGGTCCTGCTCTTGCGCCAGGTGCGCTCTGCC |
| | AAGTCCCCAGGCGCCCTC |

RatENTPD2: NP_742027

| | |
|---|---|
| SEQ ID NO: 347 | MAGKLVSLVPPLLLAAAGLAGLLLLCVPTQDVREPPALKYGIVL |
| | DAGSSHTSMFVYKWPADKENDTGIVGQHSSCDVQGGGISSYAN |
| | DPSKAGQSLVRCLEQALRDVPRDRHASTPLYLGATAGMRLLNLT |
| | SPEATARVLEAVTQTLTQYPFDFRGARILSGQDEGVFGWVTANY |
| | LLENFIKYGWVGRWIRPRKGTLGAMDLGGASTQITFETTSPSEDP |
| | GNEVHLRLYGQHYRVYTHSFLCYGRDQILLRLLASALQIHRFHPC |
| | WPKGYSTQVLLQEVYQSPCTMGQRPRAFNGSAIVSLSGTSNATL |
| | CRDLVSRLFNISSCPFSQCSFNGVFQPPVTGNFIAFSAFYYTVDFLT |
| | TVMGLPVGTLKQLEEATEITCNQTWTELQARVPGQKTRLADYC |
| | AVAMFIHQLLSRGYHFDERSFREVVFQKKAADTAVGWALGYML |
| | NFTNLIPADLPGLRKGTHFSSWVALLLLFTVLILAALVLLLRQVRS |
| | AKSPGAL |
| SEQ ID NO: 348 | ATGGCTGGAAAGTTGGTGTCACTGGTGCCACCCCTGCTGCTGG |
| | CTGCCGcGGGCCTCGCCGGCCTCCTGCTACTGTGCGTCCCTACC |
| | CAAGACGTCCGGGAGCCGCCCGCCCTCAAGTATGGCATCGTTC |
| | TGGATGCTGGCTCTTCACACACATCCATGTTTGTCTACAAGTG |
| | GCCAGCGGACAAGGAAAATGACACAGGTATCGTGGGCCAGCA |
| | CAGCTCCTGCGATGTGCAGGGCGGCGGCATTTCCAGCTATGCC |
| | AACGACCCCTCCAAAGCCGGACAGTCCCTGGTCAGGTGCCTG |
| | GAGCAGGCCCTGAGAGACGTCCCCAGAGACAGACACGCGAGC |
| | ACCCCTCTGTATCTCGGCGCCACAGCCGGCATGAGGCTGCTGA |
| | ACCTGACCTCCCCTGAGGCCACAGCCAGAGTCCTGGAGGCTGT |
| | CACCCAGACCCTGACACAGTACCCCTTCGACTTTAGGGGCGCC |
| | AGAATACTGTCCGGCCAGGATGAAGGCGTGTTCGGCTGGGTG |
| | ACAGCCAACTACCTGCTGGAGAACTTTATTAAGTACGGCTGGG |
| | TGGGCAGATGGATCAGGCCCAGGAAGGGCACCCTGGGAGCCA |
| | TGGATCTCGGCGGAGCCTCCACCCAGATCACCTTTGAGACCAC |
| | CAGCCCCTCCGAAGACCCGGGCAATGAGGTCCACCTGAGGCT |
| | GTACGGCCAGCACTATAGAGTCTACACCCACAGCTTCCTGTGC |
| | TACGGCAGAGATCAAATCCTGCTGAGACTGCTCGCTTCCGCCC |
| | TGCAGATTCATAGGTTTCACCCCTGCTGGCCCAAAGGCTACAG |
| | CACCCAGGTGCTGCTCCAAGAGGTGTACCAGAGCCCTTGCACC |
| | ATGGGACAGAGACCCAGGGCTTTCAACGGAAGCGCCATCGTG |
| | TCCCTCAGCGGCACCAGCAACGCCACCCTGTGTAGGGACCTCG |
| | TGAGCAGACTGTTCAACATCTCCTCCTGCCCTTTCAGCCAGTG |
| | TTCCTTCAATGGCGTGTTTCAGCCCCCTGTGACAGGCAACTTC |
| | ATCGCCTTCAGCGCTTTCTACTACACCGTGGACTTTCTCACAA |
| | CCGTCATGGGCCTGCCCGTGGGAACCCTGAAGCAACTGGAGG |
| | AAGCCACCGAGATCACCTGCAACCAGACCTGGACCGAACTGC |
| | AAGCCAGGGTGCCCGGCCAGAAGACCAGACTGGCCGACTACT |
| | GTGCTGTCGCCATGTTCATTCACCAACTGCTGAGCAGGGGCTA |
| | CCACTTCGATGAAAGGAGCTTCAGGGAGGTGGTGTTCCAGAA |
| | GAAGGCCGCCGATACCGCTGTGGGCTGGGCTCTGGGCTACAT |
| | GCTCAACTTCACCAACCTGATCCCCgccgatctccccggactgaggaagggaa |
| | cccacTTCAGCTCCTGGGTTGCTCTCCTGCTGCTCTTCACAGTCCT |
| | GATCTTGGCGGCTTTGGTCCTGCTCTTGCGCCAGGTGCGCTCT |
| | GCCAAGTCCCCAGGCGCCCTC |

HumanENTPD1: NP_001767

| | |
|---|---|
| SEQ ID NO: 349 | MEDTKESNVKTFCSKNILAILGFSSIIAVIALLAVGLTQNKALPEN |
| | VKYGIVLDAGSSHTSLYIYKWPAEKENDTGVVHQVEECRVKGPG |
| | ISKFVQKVNEIGIYLTDCMERAREVIPRSQHQETPVYLGATAGMR |
| | LLRMESEELADRVLDVVERSLSNYPFDFQGARIITGQEEGAYGWI |
| | TINYLLGKFSQKTRWFSIVPYETNNQETFGALDLGGASTQVTFVP |
| | QNQTIESPDNALQFRLYGKDYNVYTHSFLCYGKDQALWQKLAK |
| | DIQVASNEILRDPCFHPGYKKVVNVSDLYKTPCTKRFEMTLPFQQ |
| | FEIQGIGNYQQCHQSILELFNTSYCPYSQCAFNGIFLPPLQGDFGA |
| | FSAFYFVMKFLNLTSEKVSQEKVTEMMKKFCAQPWEEIKTSYAG |
| | VKEKYLSEYCFSGTYILSLLLQGYHFTADSWEHIHFIGKIQGSDAG |
| | WTLGYMLNLTNMIPAEQPLSTPLSHSTYVFLMVLFSLVLFTVAII |
| | GLLIFHKPSYFWKDMV |
| SEQ ID NO: 350 | ATGGAAGATACAAAGGAGTCTAACGTGAAGACATTTTGCTCC |
| | AAGAATATCCTAGCCATCCTTGGCTTCTCCTCTATCATAGCTGT |
| | GATAGCTTTGCTTGCTGTGGGGTTGACCCAGAACAAAGCATTG |
| | CCAGAAAACGTTAAGTATGGGATTGTGCTGGATGCGGGTTCTT |
| | CTCACACAAGTTTATACATCTATAAGTGGCCAGCAGAAAAGG |
| | AGAATGACACAGGCGTGGTGCATCAAGTAGAAGAATGCAGGG |
| | TTAAAGGTCCTGGAATCTCAAAATTTGTTCAGAAAGTAAATGA |
| | AATAGGCATTTACCTGACTGATTGCATGGAAAGAGCTAGGGA |
| | AGTGATTCCAAGGTCCCAGCACCAAGAGACACCCGTTTACCTG |
| | GGAGCCACGGCAGGCATGCGGTTGCTCAGGATGGAAAGTGAA |
| | GAGTTGGCAGACAGGGTTCTGGATGTGGTGGAGAGGAGCCTC |
| | AGCAACTACCCCTTTGACTTCCAGGGTGCCAGGATCATTACTG |
| | GCCAAGAGGAAGGTGCCTATGGCTGGATTACTATCAACTATCT |
| | GCTGGGCAAATTCAGTCAGAAAACAAGGTGGTTCAGCATAGT |
| | CCCATATGAAACCAATAATCAGGAAACCTTTGGAGCTTTGGAC |
| | CTTGGGGGAGCCTCTACACAAGTCACTTTTGTACCCCAAAACC |
| | AGACTATCGAGTCCCCAGATAATGCTCTGCAATTTCGCCTCTA |
| | TGGCAAGGACTACAATGTCTACACACATAGCTTCTTGTGCTAT |
| | GGGAAGGATCAGGCACTCTGGCAGAAACTGGCCAAGGACATT |
| | CAGGTTGCAAGTAATGAAATTCTCAGGGACCCATGCTTTCATC |
| | CTGGATATAAGAAGGTAGTGAACGTAAGTGACCTTTACAAGA |
| | CCCCCTGCACCAAGAGATTTGAGATGACTCTTCCATTCCAGCA |
| | GTTTGAAATCCAGGGTATTGGAAACTATCAACAATGCCATCAA |
| | AGCATCCTGGAGCTCTTCAACACCAGTTACTGCCCTTACTCCC |
| | AGTGTGCCTTCAATGGGATTTTCTTGCCACCACTCCAGGGGGA |
| | TTTTGGGGCATTTTCAGCTTTTTACTTTGTGATGAAGTTTTTAA |
| | ACTTGACATCAGAGAAAGTCTCTCAGGAAAAGGTGACTGAGA |
| | TGATGAAAAAGTTCTGTGCTCAGCCTTGGGAGGAGATAAAAA |
| | CATCTTACGCTGGAGTAAAGGAGAAGTACCTGAGTGAATACT |
| | GCTTTTCTGGTACCTACATTCTCTCCCTCCTTCTGCAAGGCTAT |
| | CATTTCACAGCTGATTCCTGGGAGCACATCCATTTCATTGGCA |
| | AGATCCAGGGCAGCGACGCCGGCTGGACTTTGGGCTACATGC |
| | TGAACCTGACCAACATGATCCCAGCTGAGCAACCATTGTCCAC |
| | ACCTCTCTCCCACTCCACCTATGTCTTCCTCATGGTTCTATTCT |
| | CCCTGGTCCTTTTCACAGTGGCCATCATAGGCTTGCTTATCTTT |
| | CACAAGCCTTCATATTTCTGGAAAGATATGGTA |

MouseENTPD1: NP_033978

| | |
|---|---|
| SEQ ID NO: 351 | MEDIKDSKVKRFCSKNILIILGFTSILAVIALIAVGLTQNKPLPENV |
| | KYGIVLDAGSSHTNLYIYKWPAEKENDTGVVQQLEECQVKGPGI |
| | SKYAQKTDEIGAYLAECMELSTELIPTSKHHQTPVYLGATAGMR |
| | LLRMESEQSADEVLAAVSTSLKSYPFDFQGAKIITGQEEGAYGWI |
| | TINYLLGRFTQEQSWLSLISDSQKQETFGALDLGGASTQITFVPQN |
| | STIESPENSLQFRLYGEDYTVYTHSFLCYGKDQALWQKLAKDIQ |
| | VSSGGVLKDPCFNPGYEKVVNVSELYGTPCTKRFEKKLPFDQFRI |
| | QGTGDYEQCHQSILELFNNSHCPYSQCAFNGVFLPPLHGSFGAFS |
| | AFYFVMDFFKKVAKNSVISQEKMTEITKNFCSKSWEETKTSYPSV |
| | KEKYLSEYCFSGAYILSLLQGYNFTDSSWEQIHFMGKIKDSNAG |
| | WTLGYMLNLTNMIPAEQPLSPPLPHSTYIGLMVLFSLLLVAVAIT |
| | GLFIYSKPSYFWKEAV |
| SEQ ID NO: 352 | ATGGAAGATATAAAGGATTCTAAGGTGAAGAGATTTTGCTCC |
| | AAAAATATTCTGATCATCCTTGGTTTCACCTCTATCTTGGCTGT |
| | GATAGCTTTGATTGCTGTGGGACTGACCCAGAACAAACCTTTG |
| | CCAGAAAATGTTAAGTATGGGATTGTGTTGGATGCGGGGTCAT |
| | CTCACACCAACCTGTACATCTACAAGTGGCCGGCCGAGAAGG |
| | AGAATGACACAGGGGTGGTGCAGCAGTTAGAGGAATGCCAAG |
| | TGAAAGGTCCTGGAATCTCAAAATATGCTCAGAAAACAGATG |
| | AAATCGGTGCGTACCTGGCCGAATGCATGGAACTGTCCACCG |
| | AACTGATACCAACATCCAAGCATCACCAGACTCCTGTCTACCT |
| | GGGAGCCACAGCAGGCATGCGCTTGCTTAGAATGGAAAGCGA |
| | ACAATCGGCAGACGAGGTCCTGGCTGCAGTGTCAACAAGCCT |
| | TAAGAGCTACCCCTTTGACTTCCAGGGTGCCAAGATCATCACT |
| | GGACAAGAGGAAGGTGCCTATGGGTGGATTACTATTAACTAT |
| | CTGCTGGGCAGATTCACTCAGGAACAGAGTTGGCTAAGCCTC |
| | ATCTCAGACAGTCAGAAACAGGAAACCTTTGGCGCTTTGGATC |
| | TCGGCGGAGCCTCCACACAGATCACCTTCGTGCCCCAAAACA |
| | GCACTATAGAGTCCCCAGAAAACTCTCTGCAATTCCGTCTCTA |
| | TGGCGAGGACTATACTGTGTACACACACAGCTTCCTGTGCTAT |
| | GGGAAGGATCAGGCTCTCTGGCAGAAACTGGCCAAGGACATT |
| | CAGGTTTCAAGTGGTGGCGTCCTTAAGGACCCATGCTTTAACC |
| | CAGGATACGAGAAGGTTGTGAATGTAAGTGAGCTCTATGGCA |
| | CTCCCTGCACCAAAAGATTCGAAAAGAAGCTACCATTTGATCA |
| | GTTTCGAATCCAGGGCACTGGAGACTACGAACAGTGCCACCA |
| | GAGCATCCTTGAGCTCTTCAACAACAGCCACTGCCCTTACTCC |
| | CAGTGTGCCTTCAATGGCGTCTTCCTGCCACCTCTCCATGGGA |
| | GTTTTGGGGCGTTTTCTGCTTTCTACTTTGTGATGGATTTTTTT |
| | AAGAAGGTAGCGAAAAACAGTGTCATCTCTCAGGAGAAAATG |
| | ACCGAGATAACAAAAAATTTTTGCTCAAAATCTTGGGAAGAG |
| | ACAAAGACATCTTATCCTTCAGTAAAGGAGAAGTACCTGAGT |
| | GAGTACTGCTTCTCGGGCGCCTACATCCTCTCTCTCCTGCAAG |
| | GCTATAACTTCACAGACAGCTCCTGGGAACAGATTCATTTTAT |
| | GGGCAAGATCAAAGACAGCAACGCGGGGTGGACTTTGGGCTA |
| | CATGCTGAACTTGACCAACATGATCCCAGCTGAACAGCCGTTG |
| | TCCCCGCCTCTCCCTCACTCCACCTACATCGGCCTCATGGTTCT |
| | CTTCTCCCTGCTCTTGGTTGCTGTGGCCATCACAGGCCTGTTCA |
| | TCTATAGCAAGCCTTCATATTTCTGGAAAGAGGCAGTA |

Expression and Purification of Recombinant Mouse ENTPD1 and Mouse and Rat ENTPD2 from HEK Cultures

[1065] Recombinant monomeric mouse or rat ENTPD2, as well as mouse ENTPD1 were generated as follows: FreeStyle™ 293-F cells (Thermo Fisher Scientific) were cultivated in Gibco™ FreeStyle™ 293 Expression medium and transiently transfected with a plasmid containing a CMV promoter, a mouse IgK signal peptide, residues 29-462 of mouse or rat ENTPD2 (the extracellular domain) or residues 38-478 of mouse ENTPD1, and a polyhistidine (His6) tag (SEQ ID NO: 639). Four days post-transfection, cells from a 1 L culture were pelleted at 2600×g for 10 minutes and supernatant was clarified by filtration through a 0.22 μm filter. The supernatant was supplemented with 20 mM Tris-HCl pH 8.0 and 20 mM Imidazole and loaded onto a column pre-packed with 6 mL Ni-NTA agarose (Qiagen). The column was washed with 10 column volumes of Wash Buffer [20 mM Tris (pH 8.0),150 mM NaCl, 20 mM Imidazole], and eluted with 5 column volumes of Elution Buffer [20 mM Tris (pH 8.0), 150 mM NaCl, 250 mM Imidazole]. Protein was buffer exchanged into TBS pH 7.4 using a PD-10 desalting column (GE Healthcare) and frozen for storage.

Expression and Purification of Human ENTPD1 and Human and Cyno ENTPD2 from Insect Cells

[1066] The Bac-to-Bac® Baculovirus expression system (Thermo Fisher Scientific) was used to express recombinant human ENTPD1 and human and cyno ENTPD2 proteins. Residues 38-478 of human ENTPD1 or residues 29-462 of human or cyno ENTPD2 were cloned into expression vector pFastBac™ 1 (Thermo Fisher Scientific) with a GP67 signal peptide and a C-terminal Avi-His₆ tag (“His₆” disclosed as SEQ ID NO: 639). The cloned vectors were transformed into DH10Bac™ Escherichia coli (Thermo Fisher Scientific) competent cells to make recombinant bacmids. The recombinant bacmids were then extracted using the PureLink® HiPure Plasmid Miniprep kit (Thermo Fisher Scientific) and transfected into Sf9 (Spodoptera frugiperda) cells using FuGene® HD (Promega) to generate recombinant baculovirus (BV). After one round of amplification, the resulting BV was used to infect High Five™ (Trichoplusia ni) cells (Thermo Fisher Scientific) in a 1 L suspension culture at a density of 2×10⁶cells/ml and at a multiplicity of infection (MOI) of 10. At 72 h post-infection, cells were pelleted by centrifugation at 2600×g for 10 min and the media containing the secreted, glycosylated, recombinant protein was collected. The supernatant was then supplemented with 50 mM Tris pH 8.0, 1 mM NiCl₂, 5 mM CaCl₂ and then centrifuged at 2600 ×g for 30 min. The supernatant was subjected to filtration through a 0.22 um filter and loaded onto a column packed with 6 mL Ni-NTA agarose (Qiagen). The column was washed with 10 column volumes of Wash Buffer described above, and eluted with Elution Buffer (also described above). Protein was buffer exchanged into TBS (20 mM Tris pH 7.4, 150 mM NaCl) using a PD-10 column (GE Healthcare) and frozen for storage.

[1067] Generation of Cell Lines Stably Expressing ENTPD1 or ENTPD2

[1068] Stable ENTPD1- or ENTPD2-expressing cell lines were generated using retroviral transduction. To generate retrovirus, 293T cells were co-transfected with a retroviral expression vector expressing ENTPD1 or ENTPD2 and a pCL-Eco or pCL-10A1packaging vector (Novus Biologicals, cat#NBP2-29540 or NBP2-2952) using FuGene® 6 transfection reagent (Promega, cat# E2692) according to the manufacturer's recommendation. Cells were maintained in a humidified incubator at 37° C. and 5% CO₂, and virus-containing cell supernatants were collected 48 hours post-transfection. NIH/3T3 and 300.19 cells (ATCC®) were grown to near confluence in 6-well plate. Growth media was removed from the cells and viral supernatant was added in the presence of 8 ug Polybrene/ml (EMD Millipore, cat#TR-1003-G). Following incubation for 3-6 hours at 37° C., fresh media was added. Cells were then cultured under appropriate selection conditions to produce stable ENTPD1 or ENTPD2-expressing cell lines.

[1069] Generation, Expression and Purification of Virus-Like Particles (VLPs)

[1070] 300.19 cells were maintained in DMEM with 10% FBS. To make VLPs, cells were exchanged into DMEM with 4% FBS, then co-transfected with a human ENTPD2 expression plasmid and a retroviral Gag expression plasmid at a μg ratio of 3:2. Forty-eight hours post-transfection, cell supernatant was collected and clarified by centrifugation at 2500 ×g for 5 min in a benchtop centrifuge and kept on ice. VLPs were purified by ultracentrifugation at 100,000×g through a 20% sucrose cushion in Ultra-Clear™ 38.5 ml centrifugation tubes (Beckman Coulter®, catalog # 344058) in a Beckman Coulter® SW 32 Ti rotor in a Sorvall™ RC 6 Plus ultracentrifuge. Resulting pellets were resuspended in 300 μl of cold sterile PBS and quantitated using a Pierce BCA Assay (Thermo Fisher Scientific catalog # 23225).

[1071] Hybridoma Generation

[1072] Bcl-2 transgenic mice [C57BL/6-Tgn (bcl-2) 22 WEHI strain] were immunized with antigen using a procedure that calls for Repetitive Immunization at Multiple Sites (RIMMS) (K. E. Kilpatrick et al. Hybridoma 1997). Briefly, mice were injected with 22.5 μg of His₆-tagged human ENTPD2 29-462 ECD protein (“His6” disclosed as SEQ ID NO: 639) at 8 specific sites proximal to peripheral lymph nodes (PLNs). This procedure was repeated 8 times over a 20 day period. On Day 18, a test bleed was collected and the serum antibody titer was analyzed by FACS and ELISA. In some instances, BALB/c mice were immunized with 50 μg of His₆-tagged human ENTPD2 29-462 ECD (“His6” disclosed as SEQ ID NO: 639) protein in Freund's Complete, Sigma Adjuvant System®, or Freund's Incomplete adjuvant, 50 μg of human ENTPD2-expressing VLPs in PBS, or 5x10e6 300.19 cells stably over-expressing human ENTPD2 (SEQ ID NO: 291) in PBS. Animals were injected subcutaneously or intraperitoneally twice two weeks apart, followed by an intravenous boost approximately two weeks later with either 50 μg of human ENTPD2-expressing VLPs or His₆-tagged human ENTPD2 29-462 ECD protein in PBS (“His6” disclosed as SEQ ID NO: 639). Ten days after the second immunization, a test bleed was collected and serum antibody titer was analyzed by FACS and ELISA. Spleens and pooled peripheral lymph nodes (PLNs) were removed from high-titer mice. To harvest lymphocytes, spleens and PLNs were washed once in PBS, and then dissociated by passage through a 70 micron screen (Falcon #352350). The resulting lymphocytes were washed 2 additional times prior to fusion in Cytofusion® medium (BTXpress Cytofusion® Electroporation Medium cat# 47001).

[1073] For the fusion, F0 myeloma cells were mixed with lymphocytes at a 1:4 ratio. The cell mixture was centrifuged, suspended in Cytofusion® medium and subsequently added to an electrofusion chamber (Harvard Apparatus Coaxial chamber 9ML Part #470020). Electrofusion was carried out per manufacturer's instructions using the CEEF-50B Hybrimune/Hybridoma system (Cyto Pulse Sciences, Inc). Fused cells were allowed to recover for 5 minutes in the chamber, diluted 1:10 in media without hypoxanthine-aminopterin-thymidine (HAT) [DMEM +20% FBS, 1% Penicillin-Streptomycin-Glutamine (PSG), 1× Non-Essential Amino Acids (NEAA), 0.5× Hybridoma Fusion and Cloning Supplement (Roche; HFCS)) and placed at 37° C. and 5% CO₂ for one hour. Next, 4× HAT medium (DMEM +20% FBS, 1% PSG, 1× NEAA, 4× HAT, 0.5× HFCS) was added to bring the concentration of HAT to 1×, and the density was adjusted to 66,000 cells/ml. The cells were plated in 384-well plates at 60 ul/well.

[1074] FACS Screening

[1075] Ten days after fusion, hybridoma plates were screened for the presence of ENTPD2-specific antibodies using flow cytometry to confirm specific binding of candidate antibodies to cell surface-expressed human ENTPD2 using three cell lines: parental NIH/3T3 cells, NIH/3T3 cells stably overexpressing human ENTPD2, and RKO cells (ATCC®), which expresses endogenous human ENTPD2. Cells were rinsed thoroughly with PBS, treated with Accutase (Millipore #SCR005) to lift them from the growth plates, and resuspended in cold PBS. Cells were biotinylated and labeled with a fluorescent dye according to manufacturer's instructions (FluoReporter™ Cell-Surface Biotinylation Kit, Thermo Fisher Scientific Cat# F-20650; PE-Cy7 Steptavidin, ThermoFisher Scientific Cat# SA1012). Cells were resuspended at approximately 1×10⁶ cells/ml in FACS buffer (PBS with 2% FBS +0.1% NaN₃). In a 384-well plate, 20 μof hybridoma supernatant was pre-seeded and 20 μL of cell suspension was added. Cells were incubated for 1 hour at 4° C., washed twice with cold FACS buffer, and resuspended in 20 μL of FACS buffer containing secondary antibody at a 1:400 dilution (Allophycocyanin-conjugated F(ab′)₂ goat anti-mouse IgG, Fcγ specific; Jackson Immunoresearch, cat# 115-136-071). After additional incubation for 45 min at 4° C., cells were washed twice with FACS buffer and resuspended in 20 μL of FACS buffer with 2 μg/ml propidium iodide (Sigma Aldrich Cat# P4864). Geometric mean fluorescence intensity was calculated on live single cells using FlowJo™ software.

[1076] Hits from this primary cell-based flow cytometry screen were confirmed in a secondary flow cytometry screen. Hybridomas expressing antibodies that bound to both NIH/3T3-hENTPD2 and RKO cells were expanded into 45 mL protein production cultures in hybridoma serum-free medium with HT Media Supplement (50×) Hybri-Max™(Sigma, cat# H0137) in CellStar®Autoflasks™ (Greiner Bio-One). Cultures were maintained in a shaking incubator at 37° C. and 5% CO₂ for approximately 8 days and then cells were pelleted and supernatants were taken through purification over Protein G resin. Proteins were subsequently buffer exchanged into PBS using NAP-10™ columns (GE Healthcare).

[1077] Recombinant Antibody Production

[1078] Hybridoma-derived mAbs were screened in a cell-based assay for inhibition of ATP hydrolysis by ENTPD2. Two lead inhibitory mAbs were identified in this assay: mAb17 and mAb16.

[1079] Chimeric antibodies comprised of murine variable regions and human constant regions were prepared. Variable region (VH and VL) DNA sequences of hybridomas were obtained for cloning and antibody optimization (humanization, removal of potential post-translational modifications, etc.). Variable region DNA from murine monoclonal antibodies was amplified by 5′ RACE from RNA obtained from each selected hybridoma cell line using standard methods. Polypeptide sequences for each of the murine variable heavy/light chains are shown in Table 1 for mAb17 and mAb16, respectively. Corresponding variable heavy/light nucleotide sequences for each of the hybridomas are shown in SEQ ID NO: 234/SEQ ID NO: 238, and SEQ ID NO: 226/SEQ ID NO: 230. For preparation of chimeric antibodies, DNA sequences coding for the hybridoma VL and VH amplified by 5′ RACE-PCR were cloned into expression vectors containing the respective human wild type heavy chain and human light chain constant region sequences (IgG1, kappa). These vectors were miniprepped using the QIAprep Spin Miniprep Kit (QIAGEN, cat # 27106) and nucleofected into a proprietary CHO cell line using an Amaxa™ 4D-Nucleofector™ (Lonza). Transfected cells were placed in selective media for stable pool generation, and resulting pools were subjected to a 14-day fed-batch protein production process. Protein-containing cell supernatants were clarified by centrifugation at 3000 ×g for 15 minutes and filtration through a 0.22 μm filter. Proteins were purified using MabSelect SuRe™ resin (GE Healthcare) on an AKTA™ Pure or an AKTA™ Purifier and eluted using Pierce™ IgG Elution Buffer (Thermo Fisher Scientific # 21004), then buffer exchanged into PBS either by dialysis or using a HiPrep Desalting column (GE Healthcare). In cases where the resulting protein was <95% dimer by analytical size exclusion chromatography (AnSEC) using a Superdex® 200 Increase, the protein was subjected to preparative SEC using a HiLoad® Superdex® 200 column (GE Healthcare) using PBS as the mobile phase.

[1080] Humanization

[1081] Variable region constructs were also designed for humanization and optimization of sequences (e.g., removal of potential post-translational modification sites) using an internal software program. One or more human frameworks were chosen for each mouse VH and VL with back mutations in the Vernier Zones (Foote and Winter 1992, Journal of Molecular Biology; 224 (2):487-499) to maintain affinity and desired functional activity. Both mAb17 and mAb16 were also humanized using three-dimensional crystal structure-based design. Briefly, the crystal structure was loaded into Molecular Operating Environment (MOE™) (Chemical Computing Group ULC) and prepared using the standard structure preparation methodology with the Amber10EHT force field. The Fab was then compared structurally with an in-house library of humanized Fabs using a custom script called “cdr_grafter SVL”. The script structurally compares the input murine Fab structure with human Fab structures in an internal database and lists detailed parameters regarding structural similarities between the murine (donor) and human (acceptor) Fabs. These parameters include framework and stem region RMSDs and CDR length comparisons. Based on these parameters, four candidate acceptor Fabs were selected for grafting donor CDRs from mAb17 and three candidate acceptor Fabs were selected for grafting donor CDRs from mAb16. Humanization of mAb17 led to the generation of mAb1, mAb2, mAb3, and mAb7. Humanization and optimization of mAb16 led to the generation of mAb4, mAb5, and mAb6.

[1082] DNA sequences coding for the designed humanized VL and VH domains from both humanization strategies were ordered from GeneArt (Life Technologies Inc. Regensburg, Germany) with codon optimization for Cricetulus griseus. These variable regions were subcloned into expression vectors containing the respective human wild-type heavy chain and human light chain constant region sequences (IgG 1, kappa) using standard methods.

[1083] Recombinant antibodies were produced by co-transfection of vectors encoding heavy and light chains into FreeStyle™ 293-F cells (Thermo Fisher Scientific). Transfected cells were maintained in Gibco® FreeStyle™ 293 Expression Medium (Thermo Fisher Scientific #12338018) in CellStar® Autoflasks™ (Greiner Bio-One) housed in a shaking incubator at 37° C. and 5% CO₂ for approximately 5 days and then cells were pelleted and protein-containing supernatants were taken through purification over MabSelect SuRe™ resin (GE Healthcare). Proteins were subsequently buffer exchanged into PBS using NAP-10™ columns (GE Healthcare).

### Example 3

### Generation of Human Anti-Human ENTPD2 Antibodies and Fab Fragments Thereof Using Phage Display

[1084] Fabs that specifically bind to human ENTPD2 (SEQ ID NO: 291) were generated using the MorphoSys HuCAL PLATINUM® phage display technology. The phagemid library is based on the HuCAL® concept (Knappik et al., 2000, J Mol Biol 296, 57-86) and employs the CysDisplay™ technology for displaying the Fab on the phage surface (Lohning, WO 2001/05950).

[1085] Four types of panning were performed: solid-phase panning against directly coated recombinant human ENTPD2 (hENTPD2), solution panning against ENTPD2, whole-cell panning, and affinity maturation panning.

[1086] Bead-Based Panning

[1087] Prior to a bead-based panning, the antigen was immobilized on magnetic carboxylic acid-coated beads (Dynabeads™ M-270 Carboxylic Acid, Thermo Fisher Scientific Cat# 14306D). Per phage pool, 1×10⁷ antigen-coated beads were blocked 1× ChemiBlocker (EMD Millipore). In parallel, an appropriate amount of phage-antibodies was blocked with 50% human serum/0.33× chemiblocker/0.05% Tween20. For prevention of selecting bead-binding phage, blocked phage particles were pre-incubated using beads with immobilized irrelevant protein. Blocked antigen-coated beads were added to the pre-adsorbed and blocked phage particles and the phage-antibodies were allowed to bind to the antigen coated beads. Phage particles bound to the antigen-coated beads were collected by magnetic separation. Several washing steps removed non-specifically bound phage. Finally, specifically bound phage were eluted from antigen-coated beads. The eluate was transferred into 14 ml of E. coli TG1 culture and incubated for phage infection.

[1088] Upon centrifugation, the infected bacteria were pelleted and resuspended in 2xYT medium, plated on LB/chloramphenicol agar plates and incubated overnight. Colonies were scraped off the plates and were used for phage rescue, polyclonal amplification of selected clones, and phage production. With purified phage the next panning round was started. The second and third round of solid phase panning was performed using the same protocol as the first round except that less antigen and more stringent washing conditions were used.

[1089] Solution Panning

[1090] An appropriate amount of Streptavidin beads (Dynabeads™ M-280 Streptavidin, Thermo Fisher Scientific Cat# 11206D) were blocked. In parallel, an appropriate amount of phage-antibodies were blocked. For removal of Streptavidin- or bead-binding phage, pre-adsorption of blocked phage particles was performed using blocked Streptavidin beads coated with biotinylated irrelevant protein. Then, biotinylated ENTPD2 was added to the pre-adsorbed and blocked phage particles and the phage-antibodies were allowed to bind to the antigen in solution. The phage-antigen complexes were captured using blocked Streptavidin beads and phage particles bound to the Streptavidin beads were collected with a magnetic separator. Unspecifically-bound phage were washed off by several washing steps. Specifically-bound phage were eluted from Streptavidin beads. The eluate was transferred into 14 ml of E. coli TG1 culture and incubated for phage infection. Subsequent phage infection and phage production were performed according to the Bead-based Panning protocol and the next panning round was started. The second and third round of bead-based solution panning were performed using the same protocol the first panning round except that washing conditions with increased stringency were applied.

[1091] Whole Cell Panning

[1092] For each panning, an appropriate amount of phage-antibodies was blocked. In parallel, an appropriate amount of target cells expressing ENTPD2 and an appropriate amount of adsorption cells without expression of antigen ENTPD2 were blocked for each phage pool. The blocked target cells were spun down, re-suspended in the pre-blocked phage particles and the phage-antibodies were allowed to bind to the antigen presented on the cell. The phage-cell complexes were washed several times. Specifically-bound phage were eluted from target cells. After centrifugation, the supernatant (eluate) was applied to antigen-negative adsorption cells for removal of phage binding to cell surface molecules other than the target antigen (post-adsorption). The final supernatant was transferred to an E. coli TG1 culture for phage infection. The second and third round of the whole-cell panning were performed using the same protocol as the first panning round.

[1093] Affinity Maturation Panning

[1094] Generation of HuCAL PLATINUM® Maturation Libraries

[1095] Four Fab candidates were selected for affinity maturation. To increase affinity and biological activity of selected antibodies, CDR-L3 and CDR-H2 regions were optimized by cassette mutagenesis using trinucleotide-directed mutagenesis, while the framework regions were kept constant (Virnekäs et al. 1994, Nucleic Acids Research 22 (25), pp. 5600-5607). For CDR-L3 optimization, a ˜400 bp DNA fragment encoding for the CDR-L3, framework 4 as well as the constant region of the light chain was removed from the sequence encoding the parental antibodies by restriction digest and replaced by a repertoire of DNA fragments encoding for diversified CDR-L3 regions together with framework 4 and the constant domain. In a second library set the CDR-H2-encoding sequence was diversified, while the connecting framework regions were kept constant. In order to reduce the background of the parental undiversified sequence a ˜150 bp DNA fragment containing the parental CDR-H2 and the framework 3 sequences was replaced by a ˜590 bp dummy sequence via restriction digest and ligation, before the diversified CDR-H2 cassette (incl. framework 3) was inserted also via restriction digest and ligation. Electroporation of ligation mixtures were in MC1061F′ cells yielded approximately 10⁸ to 10⁹ in >5×10⁶ independent colonies. Amplification of the library was performed as described previously (Rauchenberger et al. 2003, J biol chem 278 (40), pp. 38194-38205). For quality control, approx. 10-20 single clones per library were randomly picked and sequenced.

[1096] For the selection of candidates that are affinity improved, phage derived from maturation libraries were subjected to two to three rounds of maturation panning. Panning stringency was increased by lowering the antigen concentration in each panning round (Low et al. 1996, J. Mol. Biol. 260, pp. 359-368). In addition to antigen reduction, off-rate selection was performed (Hawkins et al. 1992, J. Mol. Biol. 226 (3), pp. 889-896). These strategies were combined with prolonged washing steps.

### Expression

[1097] Subcloning from Display Vector into Fab-Expression Vector for E. coli

[1098] To facilitate rapid expression of soluble Fab, the Fab-encoding inserts of the selected HuCAL PLATINUM® phage were subcloned from pMORPH®30 display vector into pMORPH® x11 expression vector pMORPH®x11_FH. After transformation of E. coli TG1 F-single clone expression and preparation of periplasmic extracts containing HuCAL®-Fab fragments were performed as described previously (Rauchenberger et al., 2003, J Biol Chem 278: 38194-38205).

[1099] Micro Scale Production of His-Tagged Fab Fragments

[1100] Expression of Fab fragments encoded by bacterial expression vector in E. coli TG1 F-cells was carried out in 50 mL Falcon tubes using 25 mL of 2xYT medium supplemented with 0.1% glucose, 34 μg/mL chloramphenicol and 1 mM IPTG (isopropyl-B-D-thiogalactopyranoside). Cultures were shaken at 30° C. for 18 h. Cells were harvested and disrupted using a combination of lysozyme and Bug Buster® Protein Extraction Reagent (Merck, Germany). His6-tagged Fab fragments (“His6” disclosed as SEQ ID NO: 639) were isolated via IMAC (GE Healthcare, Germany) and eluted using imidazole. Buffer exchange to 1× Dulbecco's PBS (pH 7.2) was performed using ‘PD MultiTrap™ G-25’ plates (GE Healthcare, Germany). Protein concentrations were determined by UV-spectrophotometry. The purity of representatively selected samples was analyzed in denaturing, non-reducing 15% SDS-PAGE.

[1101] Subcloning into IgG & FabCys Expression Vector and Expression in HKB11 Cells

[1102] For full-length IgG expression in HKB11 cells, selected candidates or candidate pools were cloned into the pMORPH® 4_IgGlf vector. Subcloning was performed as a two-step method for a convenient and efficient conversion of a large number of sequence-unique Fab clones into the IgG format.

[1103] Eukaryotic HKB11 cells were transfected with mammalian expression vector DNA encoding both heavy and light chains of IgG. Cell culture supernatants were harvested on day 3 or 6 post-transfection and subjected to standard Protein A affinity chromatography (MabSelect™ SuRe™, GE Healthcare). Unless stated otherwise, buffer exchange was performed to 1× Dulbcecco's PBS (pH 7.2, Invitrogen) and samples were sterile filtered (0.2 μm pore size).

[1104] Protein concentrations were determined by UV-spectrophotometry and purities of IgG were analyzed under denaturing, reducing and non-reducing conditions using CE-SDS (LabChip GXII, Perkin Elmer, USA). HP-SEC was performed to analyze IgG preparations in native state.

[1105] Summary of Antibodies

[1106] Table 1 sets forth sequence information for anti-human ENTPD2 antibodies derived from murine hybridomas.

### Example 4

### Biochemical Characterization of Anti-Human ENTPD2 Antibodies

[1107] Anti-human ENTPD2 antibodies were evaluated in the following assays.

[1108] FACS screening: Specific binding of candidate antibodies to endogenously expressed ENTPD2 was assessed by flow cytometry. Cells were rinsed thoroughly with 1× PBS and treated with Accutase (Millipore #SCR005) to lift from growth plates and resuspended at approximately 1×10⁵ cells/90 μL in 1× FACS buffer (2% FBS +0.1% NaN3 in PBS). In a 96-well U-bottom plate, 10 μL of 10× antibody solution in FACS buffer was pre-seeded and 90 μL of cell suspension was added. Cell were incubated for 30 minutes at 4° C., washed 1× with cold PBS and resuspended in 100 μL of 1:500 secondary antibody 1× FACS buffer (Allophycocyanin conjugated F(ab′)2 goat anti-human IgG, Fcγ specific; Jackson Immunoresearch, Cat# 109-136-098). After additional incubation for 15 min at 4° C., cells were washed twice with PBS and resuspended in 100 μL of 1× FACS buffer with 4 μg/mL propidium iodide (Life Technologies, Cat# P3566). Geometric mean fluorescence intensity was calculated on live single cells using FlowJo software.

[1109] ELISA screening on directly coated antigen: Maxisorp™ 384-well plates (Thermo Nunc) were coated with 2 μg/ml of recombinant ENTPD2 diluted in PBS. After blocking with 2% BSA (bovine serum albumin) in PBS for 1 hr at room temperature, washing plates 3× with TBST (0.05% Tween 20 in TBS, Sigma Cat# T9039), primary antibodies in TBST and 2% BSA were added in a serial dilution and incubated for 1 hr at room temperature. Plates were washed again and bound antibodies were detected by incubation with anti-hFc gamma conjugated to horseradish peroxidase (HRP; Jackson ImmunoResearch, Cat#115-035-098, diluted 1:5000 in 1× TBST+2% BSA) for 1 hr at room temperature followed by washing with TBST and afterwards addition of SureBlue Peroxidase substrate (KPL, #52-00-03) substrate. After 15 min, absorbance at 650 nM was recorded and analyzed in GraphPad Prism6.

[1110] Biacore Screening: Affinity was measured by determining the kinetic rate constants using surface plasmon resonance (SPR) on a Biacore T200 or T100 with the T200 sensitivity upgrade instrument (Biacore, GE Healthcare). Antibodies were captured on CM5 sensor chips (Biacore, GE Healthcare) prepared with a mouse anti-human IgG Fc antibody (ThermoFisher catalogue # 05-4200) amine coupled to the surface. Binding of human and cynomologus (cyno) ENTPD2 ECDs at 25° C. were detected at concentrations ranging from 0.78 nM to 500 nM depending on the affinity of the antibody. ENTPD2 analytes were allowed to associate for 180 s and dissociate for up to 1800 s depending on the off-rate of the antibody at a flow rate of 30 μL/min. The running buffer was PBS pH 7.2 (prepared from a Corning 10X stock, cat# 46-013-CM) +0.05% Tween 20. Regeneration was accomplished with 30 s injections of 3 or 4 M MgCl2 to remove all the captured antibody and remaining complex from the surface, after which fresh antibody was captured. The raw data were analyzed using Biacore T200 Evaluation Software version 1.0 and fit to a 1:1 binding model, with all parameters set to fit globally except for RI, which was set to fit locally.

[1111] Antibody specificity for mAb1-mAb10 was confirmed. All clones showed significant nM to sub-nM binding to human ENTPD2. Antibodies mAb8, mAb9, and mAb10 show weak affinity to mouse ENTPD2. None of the selected antibodies bind to rat ENTPD2. See Table 10 and Table 11.

TABLE 10
Dissociation constant (K_{D}) for select anti-human ENTPD2 antibodies

| | | | | | | | Mouse |
|---|---|---|---|---|---|---|---|
| | Human ENTPD2 | | | Cyno ENTPD2 | | | ENTPD2 |
| | BIACore | | | BIACore | | | BIACore |
| | K_{D} (nM) | kₐ (1/Ms) | k_{d} (1/s) | K_{D} (nM) | kₐ (1/Ms) | k_{d} (1/s) | K_{D} (nM) |
| MAB1 | 1.7 | 1.1E+05 | 1.9E−04 | 3.4 | 3.6E+05 | 1.2E−03 | No binding |
| MAB2 | 1.7 | 1.1E+05 | 1.8E−04 | 2.8 | 4.3E+05 | 1.2E−03 | No binding |
| MAB3 | 1.3 | 1.3E+05 | 1.6E−04 | 2.2 | 4.5E+05 | 9.8E−04 | No binding |
| MAB4 | 0.7 | 3.0E+05 | 2.2E−04 | 42.1 | 1.4E+05 | 5.7E−03 | No binding |
| MAB5 | 0.6 | 2.7E+05 | 1.6E−04 | 10.7 | 2.9E+05 | 3.0E−03 | No binding |
| MAB6 | 0.7 | 3.5E+05 | 2.6E−04 | 35.6 | 2.9E+05 | 1.0E−02 | No binding |
| MAB7 | 0.9 | 2.1E+05 | 1.9E−04 | 1.1 | 1.2E+06 | 1.2E−03 | No binding |
| MAB8 | 3.3 | 2.9E+05 | 9.4E−04 | 81.1 | 3.0E+05 | 2.4E−02 | Weak |
| | | | | | | | binding |
| MAB9 | 0.9 | 3.8E+05 | 3.0E−04 | 20.9 | 9.9E+05 | 2.1E−02 | 750 |
| MAB10 | 0.8 | 3.4E+05 | 2.4E−04 | 15.2 | 1.2E+06 | 1.8E−02 | Weak |
| | | | | | | | binding |

TABLE 11
Binding of select anti-human ENTPD2 antibodies
to ENTPD2 Expressing Cells

| | Apparent FACS Affinity; EC50 (nM) | | |
|---|---|---|---|
| | NIH3T3 | NIH3T3 | |
| Antibody | humanENTPD2 | cynoENTPD2 | RKO |
| ANTI-HUMAN | 1.5 | 3.3 | 0.9 |
| ENTPD2 MAB1 | | | |
| ANTI-HUMAN | 2.1 | 4.2 | 1.3 |
| ENTPD2 MAB2 | | | |
| ANTI-HUMAN | 2.8 | 5.4 | 2.1 |
| ENTPD2 MAB3 | | | |
| ANTI-HUMAN | 0.9 | 6.1 | 0.5 |
| ENTPD2 MAB4 | | | |
| ANTI-HUMAN | 0.9 | 5.2 | 0.4 |
| ENTPD2 MAB5 | | | |
| ANTI-HUMAN | 0.9 | 7.0 | 0.4 |
| ENTPD2 MAB6 | | | |
| ANTI-HUMAN | 0.5 | 0.8 | 0.4 |
| ENTPD2 MAB7 | | | |
| ANTI-HUMAN | 0.6 | 2.1 | 0.3 |
| ENTPD2 MAB8 | | | |
| ANTI-HUMAN | 0.6 | 1.3 | 0.5 |
| ENTPD2 MAB9 | | | |
| ANTI-HUMAN | 0.8 | 1.7 | 0.6 |
| ENTPD2 MAB10 | | | |

[1112] Cross reactivity Human ENTPD1 (NP_001767) expressing NIH/3T3 cells were generated using a retroviral transduction approach. 72hrs post transduction, engineered cells were stained with the anti-Human CD39/ENTPD1 APC-conjugated Antibody (R&D systems, Minneapolis, Minn.) and live cells that expressed human ENTPD1 were separated from the rest of the population via fluorescence activated cell sorting. Stable expression of ENTPD1 was periodically re-confirmed by FACS with the above described anti-Human CD39/ENTPD1 APC-conjugated Antibody (1:100).

[1113] H520 cells were identified as a cancer cell line with ENTPD3 (Ct 25) and ENTPD8 (Ct 26) expression by Taqman and were used for selectivity screening.

[1114] No significant binding to any of the control cell lines was observed with any of the Anti-human ENTPD2 Abs tested (Table 12).

TABLE 12
Cross Reactivity of Anti-human ENTPD2 mAbs.

| | Apparent FACS binding at 50 nM | | |
|---|---|---|---|
| Antibody | NIH/3T3 cells | NIH/3T3 - ENTPD1 | H520 Cells |
| ANTI-HUMAN | No binding | No binding | No binding |
| ENTPD2 MAB1 | | | |
| ANTI-HUMAN | No binding | No binding | No binding |
| ENTPD2 MAB2 | | | |
| ANTI-HUMAN | No binding | No binding | No binding |
| ENTPD2 MAB3 | | | |
| ANTI-HUMAN | No binding | No binding | No binding |
| ENTPD2 MAB4 | | | |
| ANTI-HUMAN | No binding | No binding | No binding |
| ENTPD2 MAB5 | | | |
| ANTI-HUMAN | No binding | No binding | No binding |
| ENTPD2 MAB6 | | | |
| ANTI-HUMAN | No binding | No binding | No binding |
| ENTPD2 MAB7 | | | |
| ANTI-HUMAN | No binding | >100 nM | No binding |
| ENTPD2 MAB8 | | | |
| ANTI-HUMAN | No binding | No binding | No binding |
| ENTPD2 MAB9 | | | |
| ANTI-HUMAN | No binding | No binding | No binding |
| ENTPD2 MAB10 | | | |

[1115] Epitope Binning Using Octet Red96 System

[1116] Epitope binning of anti-human ENTPD2 antibodies was performed using the Octet Red96 system (ForteBio, USA) that measures biolayer interferometry (BLI). Human ENTPD2-Avi-His6protein (“His6” disclosed as SEQ ID NO: 639) was biotinylated via an AviTag™ utilizing BirA biotin ligase according to manufacturer's recommendations (Avidity, LLC, USA cat# BirA500). The biotinylated immunogen scaffold was loaded at 0.5 μg/mL onto pre-equilibrated streptavidin sensors (ForteBio, USA). The sensors were then transferred to a solution containing 100 nM antibody A in 1× kinetics buffer (ForteBio, USA). Sensors were briefly washed in 1× kinetics buffer and transferred to a second solution containing 100 nM of competitor antibody. Binding kinetics was determined from raw data using the Octet Red96 system analysis software (Version 9.0, ForteBio, USA). Antibodies were tested in all pairwise combinations, as both the first (blocking) antibody bound to hENTPD2 and as the second (competitor) antibody. All of the antibodies demonstrated significant cross-blocking in this assay, indicating that mAb1-10 may have similar epitope.

### Example 5

### Crystallography and Epitope Mapping of Anti-Human ENTPD2 FAb22

[1117] In this Example, anti-human ENTPD2 FAb22 was crystallized in complex with human ENTPD2 (Y350A mutant) ectodomain and the corresponding structure was determined. Analysis of anti-human ENTPD2 FAb22 binding to human ENTPD2 based on the X-ray data provided molecular details of antigen engagement and insights to the Fab paratopes and antigen epitopes revealed.

[1118] Materials and Methods

[1119] Expression and Purification of Fab Fragments

[1120] DNA sequences coding for the identified VH and VL domains were subcloned into mammalian expression vectors containing the respective human wild-type CH1 and human kappa light chain constant region sequences. Recombinant human Fabs were produced by transient co-transfection of vectors into cells using transfection reagent. Following transfection, cells were cultured for 5 to 6 days, and purification of antibodies was carried out. Cells were pelleted by centrifugation (2600 ×g for 10 minutes), and antibody-containing cell supernatants were clarified by filtration through a 0.22 micrometre filter. Fabs were purified over Protein G (GE Healthcare Life Sciences) columns and eluted using acidic eluate buffer conditions.

[1121] Preparation of Human ENTPD2 and Anti-Human ENTPD2 FAb22 Complex

[1122] To prepare the ENTPD2-FAb22 complex, a 1.3-fold molar excess of FAb22 was combined with hENTPD2 Y350A in 20 mM Tris pH 7.5 with 150 mM NaCl to give a final concentration of 5.65 mg/mL. The complex sample was incubated on ice for 2 hours and submitted for crystallization screen set ups.

[1123] Crystallization and X-Ray Data Collection

[1124] Crystals were grown in 96-well plates (Greiner Bio-One Crystalquick Plus plates) by sitting drop vapor diffusion. In detail, 0.2 μl of protein stock was mixed with 0.2 μl of reservoir solution, and the drop was equilibrated against 50 μl of the same reservoir solution at 20° C. The experiments were set up with a Phoenix robotic system (Art Robbins Instruments), and stored in in-house custom engineered crystal imager and gantry (Novartis GNF internal systems).

[1125] For X-ray data collection, a single crystal was directly mounted in a cryo-loop and flash cooled into liquid nitrogen. X-ray data were collected at the Advanced Light Source, BL5.03, with Quantum Q315 CCD detector, using 0.9765 Å X-ray radiation. 180 images of 1.0° oscillation each were recorded at a crystal-to-detector distance of 350 mm and processed with HKL2000 (Z. Otwinowski and W. Minor, “Processing of X-ray Diffraction Data Collected in Oscillation Mode”, Methods in Enzymology, Volume 276: Macromolecular Crystallography, part A, p.307-326, 1997,C.W. Carter, Jr. & R. M. Sweet, Eds., Academic Press (New York).

[1126] Structure Determination and Analysis

[1127] The structure of the FAb22-ENTPD2 complex was determined by molecular replacement with the program Phaser (McCoy et al., 2007, J Appl Crystallogr 40:658-674), using the refined structures of human ENTPD2 previously determined in house and coordinates for anti-RSV Fab B21m (PDB code 3QRG) as independent search models. The structure was refined using iterative cycles of model building followed by automated crystallographic refinement with the programs Coot 0.8.0 (Crystallographic Object-Oriented Toolkit; Emsley et al., 2010, Acta Crystallogr Sect D: Biol Crystallogr; 66:486-501) and Autobuster 2.11.5 (Bricogne et al., 2011, BUSTER version 2.11.2. Cambridge, United Kingdom: Global Phasing Ltd.).

[1128] Visual inspection of the crystal structures was carried out using the programs Coot (Emsley et al., 2010, Acta Crystallogr Sect D: Biol Crystallogr; 66:486-501) and PyMOL (Molecular Graphics System; DeLano Scientific: Palo Alto, Calif.). The quality of the final refined models was assessed with the programs Coot and PROCHECK v3.3 (Laskowski et al., 1992, J Appl Crystallogr; 26:283-291). Residues of human ENTPD2 that become less accessible to solvent upon binding of the anti-human ENTPD2 FAb22 were identified by the program AREAIMOL of the CCP4 program suite (Collaborative Computational Project, Number 4, 1994). Intermolecular contacts were defined using a cut-off distance of 4.0 Å and were identified with the CCP4 program NCONT.

[1129] Results

[1130] Crystal Structure of the Anti-hENTPD2 FAb22 in Complex with Human ENTPD2

[1131] The anti-hENTPD2 FAb22 complexed with human ENTPD2 Y350A mutant was crystallized in 96-well plates by the method of vapor diffusion in sitting drops, at 20° C. Crystals grew in 0.1M HEPES pH 7.5, 20% polyethylene glycol 3350, 0.2M magnesium chloride. Crystals appeared after approximately 6 weeks and grew to full size within a few days.

[1132] The crystal of the FAb22-ENTPD2 complex was in monoclinic space group C2, with one complex per asymmetric unit. A complete diffraction data set was collected for the complex to 2.75 Angstrom resolution.

[1133] Structure determination by molecular replacement was performed using the previously determined human ENTPD2 coordinates and Fab coordinates from PDB code 3QRG. Refinement with AutoBuster led to good refinement statistics and overall geometry. Two FAb22 residues, Ala55L and Tyr33H, and four ENTPD2 residues, Gly120, Thr122, Tyr229, and Ala430, were Ramachandran outliers in the structure of the FAb22-ENTPD2 complex. ENTPD2 residues Gly120 and Thr122, in addition to Fab residues Ala55L and Tyr33H are well-defined in the electron-density and are likely genuine geometry outliers. Worthy of note, Tyr33H is a CDR residue involved in ENTPD2 binding as described below. ENTPD2 residues Tyr229 and Ala430 were loosely modeled in the electron density.

[1134] The amino-acid sequences of the anti-human ENTPD2 FAb22 heavy chain and light chain are provided in FIG. 3A, with the CDRs underlined (as defined by Kabat, 1991, Sequences of proteins of immunological interest, NIH Publication No. 91-3242) and residues located at the Fab-antigen interface labeled with *. An overall view of the three dimensional structure of the anti-human ENTPD2 FAb22/ENTPD2 Y350A complex is depicted in FIG. 6.

[1135] The amino-acid sequence of recombinant human ENTPD2 used in this example (SEQ ID NO: 291) is provided in FIG. 4A. Soluble extracellular domain of human ENTPD2 spans residues 29-462. An engineered mutation of Y350A was present in the construct and highlighted in gray italics. The construct used here utilized an N-terminal GP67 secretion signal peptide (first 38 residues) and a C-terminal 6×Histidine tag (SEQ ID NO: 639). Asn64, Asn129, Asn294, Asn378, and Asn443 are predicted N-linked glycosylation sites for which only those where glycosylation was observed in the crystal structure highlighted in gray italics. The secondary structure elements are shown below the amino acid sequence with bars representing alpha-helices, arrows representing beta-strands. Residues for which no secondary structure elements are labeled represent unstructured loop and turn segments.

[1136] The human ENTPD2 amino acid sequence bears high sequence homology with rodent species and other mammals and the structure possesses a nearly identical overall fold to that described for the rat ENTPD2 (i.e. PDB code 3CJA, Zebisch, M., Strater, N. (2008) Proc. Natl. Acad. Sci. USA 105: 6882-6887). Invariant and conserved disulfide pairings are observed for Cys75/Cys99, Cys242/Cys284, Cys265/Cys310, Cys323/Cys328 and Cys377/Cys399. The RMSD (root mean squared deviation) across 388 C-α carbons between the human and rat ENTPD2 structures is approximately 0.365 Å.

[1137] The final model for the FAb22/ENTPD2 complex contained residues 37-448 of ENTPD2. The active site for ATP hydrolysis resides between the two subdomains (subdomain 1: Pro36-Ser161 and Lys427-Phe461; subdomain 2: Gly162-Gln426). ENTPD2 residues omitted from final model include residues 29-36 of the N-terminus and 60-65 corresponding to loop residues connecting strands β2 and β3, residues 179-193 corresponding to the membrane interacting loop (MIL), and C-terminal residues beyond Ile448. All heavy and light chain Fab residues were included in the final refined model except the terminal cysteines (Cys228 heavy chain/Cys218 light chain).

[1138] The FAb22 binds ENTPD2 antigen primarily through engagement of the predicted membrane distal lobe through interactions involving all 6 CDRs of heavy and light chain variable domains. No FAb22 CDR residues appear to penetrate appreciably into the ENTPD2 active site cleft to affect ATP substrate binding. Heavy chain CDR3 and CDR2 residues sequester residues including and flanking the antiparallel 2 stranded β-sheet comprised of strands β10/β11. Terminal heavy chain CDR3 residues make additional binding contacts to residues of the N-terminal end of helix α14, as well as α8 and α13 helices. Light chain variable domain binding interactions with ENTPD2 largely involve CDR1 and CDR3 residues which bind predominantly the N-terminal end of helix α14. Formation of the FAb22/ENTPD2 complex buries approximately 16700 Å2 of the total combined solvent-accessible surface with nearly equal contributions from heavy and light Fab chains. Epitope and paratope residues involved in direct intermolecular contacts calculated within a 4.0 Å distance cut-off are listed in Table 13, and labeled in FIGS. 3A and 4A. A total of 25 Fab residues and 26 ENTPD2 residues are involved in direct intermolecular contacts, with heavy chain CDRs contributing more binding residues than light chain CDRs. Of these Fab paratope residues, CDR tyrosines contribute a large number of ENTPD2 contacts with 10 of 14 CDR Tyr residues involved. Heavy chain CDR residues in intermolecular contacts include CDR1 residues Ser31, Gly32, Tyr33, and Tyr34; CDR2 residues Tyr54, Asp55, Asp57; and CDR3 residues Tyr100, Tyr101, Arg102, Tyr103, Ser106, Tyr107, Asp112, Tyr113. Tyr27 of heavy chain FR1 also makes contact to the ENTPD2 antigen. Light chain CDR1 residues involved in ENTPD2 binding include Tyr31, Asp32, Gly33, and Tyr36 as well as CDR2 light chain residues Glu59, Ser60, and CDR3 residues Ser95, Asn96, and Asp 98. Glu1 whose side chain is disordered and not modeled in complex structure in addition to Gly61 of FR3 are within contact distance of N-linked glycosylation observed for Asn294 of ENTPD2 antigen and highlighted in FIG. 3A.

TABLE 13
Epitope and paratope residues FAb22/hENTPD2

| Human ENTPD2 epitope | | | |
|---|---|---|---|
| Structural | Contact | Anti-human ENTPD2 FAb22 paratope | |
| element | residues | Contact residues | Structural element |
| β3-α1 loop | Gly79 | Asp32L, Gly33L | L-CDR1 |
| α8 | Gln250 | Tyr103H | H-CDR3 |
| | Leu253 | Tyr103H | H-CDR3 |
| α8-β10 loop | Trp266 | Tyr107H | H-CDR3 |
| | Arg268 | Tyr54H, Asp55H, | H-CDR2 |
| | | Asp57H | |
| | Gly269 | Tyr34H | H-CDR1 |
| | | Tyr54H, Asp55H | H-CDR2 |
| | Phe270 | Tyr34H, Tyr54H | H-CDR1, H-CDR2 |
| | | Tyr101H, Tyr107H | H-CDR3 |
| β10 | Ser271 | Gly32H, Tyr33H, | H-CDR1 |
| | | Tyr34H | H-CDR2, H-CDR3 |
| | | Tyr54H, Tyr101H | |
| | Thr272 | Tyr101H | H-CDR3 |
| | Gln273 | Tyr33H, Tyr103H | H-CDR1, H-CDR3 |
| | | Tyr100H, Tyr101H, | H-CDR3 |
| | | Tyr113H | |
| | Val274 | Tyr103H | H-CDR3 |
| β10-α9 loop | Leu275 | Arg102H | H-CDR3 |
| α9 | Asp278 | Tyr103H | H-CDR3 |
| β11 | Arg298 | Asp112H, Tyr113H | H-CDR3 |
| | | Glu59L, Ser60L | L-CDR2 |
| | Ser300 | Tyr27H, Tyr33H | H-FR1, H-CDR1 |
| | Ser302 | Ser31H, Gly32H | H-CDR1 |
| | | Tyr54H | H-CDR2 |
| β11-α10 loop | Gly303 | Tyr54H | H-CDR2 |
| α12-α13 loop | Thr380 | Asp57H | H-CDR2 |
| α13 | Trp381 | Tyr34H, Tyr101H | H-CDR1, H-CDR3 |
| | Ala382 | Asp57H | H-CDR2 |
| α13-β14 loop | Gly390 | Tyr31L | L-CDR1 |
| | Gln391 | Tyr31L | L-CDR1 |
| α14 | Arg392 | Tyr101H | H-CDR3 |
| | | Ser95L, Asn96L, | L-CDR3 |
| | | Asp98L | |
| | Ala393 | Ser106H | H-CDR3 |
| | | Tyr31L, Tyr36L | L-CDR1 |
| | Arg394 | Tyr31L, Asp32L | L-CDR1 |
| | Asp397 | Tyr107H | H-CDR3 |

The lists of epitope and paratope residues in direct contact were derived from the final refined coordinates with the CCP4 program NCONT, using a 4.0 Å distance cut-off.

### Example 6

### Crystallography and Epitope Mapping of Anti-Human ENTPD2 FAb23

[1139] In this Example, anti-human ENTPD2 FAb23 was crystallized in complex with human ENTPD2 (Y350A mutant) ectodomain and the corresponding structure was determined. Analysis of anti-human ENTPD2 FAb23 binding to human ENTPD2 based on the X-ray data provided molecular details of antigen engagement and insights to the Fab paratopes and antigen epitopes revealed.

[1140] Materials and Methods

[1141] Preparation of Human ENTPD2 and Anti-Human ENTPD2 FAb23 Complex

[1142] To prepare the ENTPD2-FAb23 complex, a 1.6-fold molar excess of ENTPD2 was combined with the FAb23 in 20 mM Tris pH 7.5 with 100 mM NaCl and concentrated to 9.08 mg/mL by ultrafiltration, incubated on ice for 10 minutes, and submitted for crystallization trial set ups.

[1143] Crystallization and X-Ray Data Collection

[1144] The anti-hENTPD2 FAb23 complexed with human ENTPD2 Y350A mutant was crystallized in 96-well plates (Greiner Bio-One) by the method of vapor diffusion in sitting drops, at 20° C. In detail, 0.2 μl of protein stock was mixed with 0.2 μl of reservoir solution, and the drop was equilibrated against 50 μl of the same reservoir solution at 20° C. The experiments were set up with a Phoenix robotic system (Art Robbins Instruments), and stored in in-house custom engineered crystal imager and gantry (Novartis GNF internal systems).

[1145] For X-ray data collection, one crystal was directly mounted in a cryo-loop and flash cooled into liquid nitrogen. X-ray data sets were collected at the Advanced Light Source, BL5.03, with Quantum Q315r CCD detector, using 0.9765 Å X-ray radiation. 140 images of 1.0° oscillation each were recorded at a crystal-to-detector distance of 300 mm and processed with HKL2000 (Z. Otwinowski and W. Minor, “Processing of X-ray Diffraction Data Collected in Oscillation Mode”, Methods in Enzymology, Volume 276: Macromolecular Crystallography, part A, p.307-326, 1997,C. W. Carter, Jr. & R. M. Sweet, Eds., Academic Press (New York).

[1146] Structure Determination and Analysis

[1147] The structure of the FAb23-ENTPD2 complex was determined by molecular replacement with the program Phaser (McCoy et al., 2007, J Appl Crystallogr 40:658-674), using the refined coordinates of human ENTPD2 previously determined in house and a homology model of the FAb23 generated with the antibody modeler tool in MOE software (Molecular Operating Environment (MOE), 2013.08; Chemical Computing Group ULC, 1010 Sherbooke St. West, Suite #910, Montreal, QC, Canada, H3A 2R7, 2018) which showed high sequence similarity to the Fab fragment of ICSM 18-anti-PRP (PDB code 4W9D) as independent search models. The structure was refined using iterative cycles of model building followed by automated crystallographic refinement with the programs Coot 0.8.0 (Crystallographic Object-Oriented Toolkit; Emsley et al., 2010, Acta Crystallogr Sect D: Biol Crystallogr; 66:486-501) and Autobuster 2.11.5 (Bricogne et al., 2011, BUSTER version 2.11.2. Cambridge, United Kingdom: Global Phasing Ltd.).

[1148] Visual inspection of the crystal structure was carried out using the programs Coot (Emsley et al., 2010, Acta Crystallogr Sect D: Biol Crystallogr; 66:486-501) and PyMOL (Molecular Graphics System; DeLano Scientific: Palo Alto, Calif.). The quality of the final refined models was assessed with the programs Coot and PROCHECK v3.3 (Laskowski et al., 1992, J Appl Crystallogr; 26:283-291). Residues of human ENTPD2 that become less accessible to solvent upon binding of the anti-human ENTPD2 MAB17 Fab were identified by the program AREAIMOL of the CCP4 program suite (Collaborative Computational Project, Number 4, 1994). Intermolecular contacts were defined using a cut-off distance of 4.0 Å and were identified with the CCP4 program NCONT.

[1149] Results

[1150] Crystal Structure of the Anti-hENTPD2 FAb23/ENTPD2 Complex

[1151] The anti-hENTPD2 FAb23 complexed with human ENTPD2 Y350A mutant was crystallized in 96-well plates by the method of vapor diffusion in sitting drops, at 20° C. Crystals grew in 0.08M Bis-Tris propane pH 8.8, 0.02M citric acid, 16% PEG3350. Crystals appeared after approximately 6 weeks and grew to full size within a few days.

[1152] The crystal of the FAb23-ENTPD2 complex was in monoclinic space group P21, with one complex per asymmetric unit. A complete diffraction data set was collected for the complex to 2.0 Angstrom resolution. The final model for the FAb23 complexed with ENTPD2 was refined with AutoBuster with good refinement statistics and overall geometry. A total of four Ramachandran outliers were present in the final model with two residues from the FAb23 light chain (Ser39 and Thr50) and two from ENTPD2 (Thr122 and Ala430). Electron density was poor for Ser39 of the Fab light chain and tentatively modeled. All other residues were adequately defined in the electron density and likely genuine Ramachandran outliers. ENTPD2 residues omitted from final model include residues 29-34 of the N-terminus and residues beyond 448 of the C-terminus. Residues 139-144 of the FAb23 chain constant region and the terminal cysteine (Cys227) were also omitted from the final model. The last two residues of the FAb23 light chain (Glu212 and Cys213) were also absent from final model due to disorder.

[1153] The amino-acid sequences of the anti-human ENTPD2 FAb23 heavy chain and light chains are provided in FIG. 3B, with the CDRs underlined (as defined by Kabat, 1991, Sequences of proteins of immunological interest, NIH Publication No. 91-3242) and residues located at the Fab-antigen interface labeled with *. An overall view of the three dimensional structure of the FAb23/ENTPD2 Y350A complex is depicted in FIG. 7.

[1154] In contrast to FAb22, binding of the FAb23 to ENTPD2 involves significant engagement of both membrane proximal and distal lobes by both heavy and light chain variable domains. Heavy chain variable region loops CDR2 and CDR3 participate in ENTPD2 binding, with no contribution from CDR1. Residues from all 3 CDRs from the light chain variable region are involved in ENTPD2 binding Contacts with the ENTPD2 membrane distal lobe are largely conferred by residues from heavy chain CDR3, light chain CDR2, and light chain FR3 residues binding to residues of the ENTPD2 loop region residues between α13 and α14, as well as FR3 interactions with antiparallel strands β10/β11 and helix α9. CDR3 light chain and CDR2 heavy chain residues confer extensive binding to α2 helix and loop residues connecting β3 and al of the membrane proximal lobe of ENTPD2. Heavy chain CDR3 projects terminal residues Tyr104, Tyr105, and Gly106 into the ENTPD2 active site cleft between N-terminal ends of helices α8, α11, and α14 of the membrane distal lobe. Superposition of the ATP analog AMP-PNP from bound rat ENTPD2 crystal structure PDB 3CJA suggest Tyr105 is positioned where the adenine ring of ATP would be predicted to bind, potentially sterically obstructing substrate binding. Tyr105 and Tyr104 of the heavy chain CDR3 terminus may also perturb ENTPD2 active site residues including Tyr350 and Arg394 necessary for π-π and cation-π stacking interactions with the adenine ring of substrate ATP. Binding of the FAb23 to ENTPD2 buries approximately 17500 Å2 of combined solvent-accessible surface. Epitope and paratope residues involved in direct intermolecular contacts calculated within a 4.0 Å distance cut-off are listed in Table 14, and labeled in FIGS. 3B and 4A. 25 Fab residues and 29 ENTPD2 residues were involved in direct intermolecular contacts. Heavy chain residues Tyr55, Ile57, Thr59, Gln62 of CDR2, as well as Phe102, Tyr105, Ile107, Tyr110 of CDR3 contribute to ENTPD2 binding with no contribution from CDR1 residues. Light chain residues contributing to ENTPD2 binding include Ser27 and Tyr31 from CDR1, Ser49 and Asn52 from CDR2, and Trp90, Ser91, Ser92, Tyr93, and Trp95 of CDR3. Non-CDR light chain residues contributing to ENTPD2 binding include Glu1, which is observed and modeled as pyroglutamate in the crystal structure, Thr22 of FR1, and Ser64, Gly65, Ser66, Gly67, Thr68, and Phe69 of FR3.

TABLE 14
Epitope and paratope residues FAb23/human ENTPD2

| Human ENTPD2 epitope | | | |
|---|---|---|---|
| Structural | Contact | Anti-human ENTPD2 FAb23 paratope | |
| element | residues | Contact residues | Structural element |
| β1-β2 loop | His50 | Ile107H | H-CDR3 |
| β3 | Asp76 | Ile107H | H-CDR3 |
| β3-α1 loop | Pro78 | Tyr110H, Trp95L | H-CDR3, L-CDR3 |
| | Gly79 | Trp90L, Ser91L | L-CDR3 |
| | Gly80 | Ser91L | L-CDR3 |
| α1 | Tyr85 | Ser91L, Ser92L, Tyr93L | L-CDR3 |
| α1-α2 loop | Asp87 | Ser27L | L-CDR1 |
| | Asn88 | Glu1L, Tyr93L | L-FR1, L-CDR3 |
| α2 | Gly91 | Tyr93L | L-CDR3 |
| | Gln94 | Gln62H, Tyr93L | H-CDR2, L-CDR3 |
| | Ser95 | Tyr93L | L-CDR3 |
| | Gly98 | Ile57H, Thr59H | H-CDR2 |
| | Glu101 | Ile57H | H-CDR2 |
| | Gln102 | Tyr55H, Ile57H | H-CDR2 |
| | Gln105 | Tyr55H, Ile57H | H-CDR2 |
| | Asp106 | Tyr55H | H-CDR2 |
| α8 | Arg245 | Tyr104H, Tyr105H | H-CDR3 |
| β10 | Thr272 | Ser64L, Gly65L | L-FR3 |
| | Gln273 | Phe69L | L-FR3 |
| | Leu275 | Thr68L, Phe69L | L-FR3 |
| α9 | Asp278 | Ser66L, Gly67L, | L-FR3 |
| | | Thr68L, Phe69L | |
| β11 | Arg298 | Thr22L, Phe69L | L-FR1, L-FR3 |
| β12-α11 loop | Ala347 | Tyr105H | H-CDR3 |
| α11 | Ala350 | Tyr105H | H-CDR3 |
| | Thr351 | Tyr105H | H-CDR3 |
| α13-α14 loop | Arg392 | Asn52L | L-CDR2 |
| | Ala393 | Phe102H, Tyr104H, | H-CDR3, L-CDR2 |
| | | Ser49L | |
| | Arg394 | Tyr104H, Tyr31L | H-CDR3, L-CDR1 |
| α14 | Tyr398 | Tyr104H, Tyr105H | H-CDR3 |

The lists of epitope and paratope residues in direct contact were derived from the final refined coordinates with the CCP4 program NCONT, using a 4.0 Å distance cut-off.

### Example 7

### Crystallography and Epitope Mapping of Anti-Mouse ENTPD2 FAb24

[1155] In this Example, anti-murine ENTPD2 Fab MAB13 was crystallized in complex with murine ENTPD2 ectodomain and the corresponding structure was determined. Analysis of anti-mouse ENTPD2 FAb24 binding to murine ENTPD2 based on the X-ray data provided molecular details of antigen engagement and insights to the Fab paratopes and antigen epitopes revealed.

[1156] Materials and Methods

[1157] Preparation of Murine ENTPD2 and Anti-Mouse ENTPD2 FAb24 Complex

[1158] To prepare the murine ENTPD2 FAb24 complex, purified murine ENTPD2 and FAb24 in 20 mM Tris pH 7.5 with 100 mM NaCl were combined in 1:1 molar ratio, incubated on ice at 4 degrees Celcius overnight. The following morning, sample was concentrated to 9.88 mg/mL by ultrafiltration, and submitted for crystallization trial set ups.

[1159] Crystallization and X-Ray Data Collection

[1160] The anti-mouse ENTPD2 FAb24 complexed with ENTPD2 Y350A mutant was crystallized in 96-well plates (Greiner Bio-One) by the method of vapor diffusion in sitting drops, at 20° C. In detail, 0.2 μl of protein stock was mixed with 0.2 μl of reservoir solution, and the drop was equilibrated against 50 μl of the same reservoir solution at 20° C. The experiments were set up with a Phoenix robotic system (Art Robbins Instruments), and stored in in-house custom engineered crystal imager and gantry (Novartis GNF internal systems).

[1161] For X-ray data collection, one crystal was directly mounted in a cryo-loop and flash cooled into liquid nitrogen. X-ray data sets were collected at the SSRL, beamline 7-1, using 1.1808 Å X-ray radiation, equipped with an ADSC Quantum 315r CCD detector. 340 images of 0.5° oscillation each were recorded at a crystal-to-detector distance of 400 mm and processed with HKL2000 (Z. Otwinowski and W. Minor, “Processing of X-ray Diffraction Data Collected in Oscillation Mode”, Methods in Enzymology, Volume 276: Macromolecular Crystallography, part A, p.30′7-326, 1997,C.W. Carter, Jr. & R. M. Sweet, Eds., Academic Press (New York).

[1162] Structure Determination and Analysis

[1163] The FAb24-mouse ENTPD2 complex structure was determined by molecular replacement with the program Phaser (McCoy et al., 2007, J Appl Crystallogr 40:658-674), using the refined structures of murine ENTPD2 and FAb24 previously determined in house as independent search models. The structure was refined using iterative cycles of model building followed by automated crystallographic refinement with the programs Coot 0.8.0 (Crystallographic Object-Oriented Toolkit; Emsley et al., 2010, Acta Crystallogr Sect D: Biol Crystallogr; 66:486-501) and Autobuster 2.11.5 (Bricogne et al., 2011, BUSTER version 2.11.2. Cambridge, United Kingdom: Global Phasing Ltd.).

[1164] Visual inspection of the crystal structure was carried out using the programs Coot (Emsley et al., 2010, Acta Crystallogr Sect D: Biol Crystallogr; 66:486-501) and PyMOL (Molecular Graphics System; DeLano Scientific: Palo Alto, Calif.). The quality of the final refined models was assessed with the programs Coot and PROCHECK v3.3 (Laskowski et al., 1992, J Appl Crystallogr; 26:283-291). Residues of murine ENTPD2 that become less accessible to solvent upon binding of the anti-mouse ENTPD2 FAb24 were identified by the program AREAIMOL of the CCP4 program suite (Collaborative Computational Project, Number 4, 1994). Intermolecular contacts were defined using a cut-off distance of 4.0 Å and were identified with the CCP4 program NCONT.

[1165] The FAb24-mouse ENTPD2 complex structure was determined by molecular replacement with the program Phaser (McCoy et al., 2007, J Appl Crystallogr 40:658-674), using the refined structures of murine ENTPD2 and FAb24 previously determined in house as independent search models. The structure was refined using iterative cycles of model building followed by automated crystallographic refinement with the programs Coot 0.8.0 (Crystallographic Object-Oriented Toolkit; Emsley et al., 2010, Acta Crystallogr Sect D: Biol Crystallogr; 66:486-501) and Autobuster 2.11.5 (Bricogne et al., 2011, BUSTER version 2.11.2. Cambridge, United Kingdom: Global Phasing Ltd.).

[1166] Results

[1167] Crystal Structure of the Anti-Mouse ENTPD2 FAb24/Mouse ENTPD2 Complex

[1168] The anti-mouse ENTPD2 FAb24 complexed with murine ENTPD2 was crystallized in 96-well plates by the method of vapor diffusion in sitting drops, at 20° C. Crystals grew in 0.2M tri-ammonium citrate pH 7.0, 20% PEG3350. Crystals appeared after approximately 1 month and grew to full size within a few days.

[1169] The FAb24-mouse ENTPD2 complex crystal was in monoclinic space group P21, with one complex per asymmetric unit. A complete diffraction data set was collected for the complex to 3.0 Angstrom resolution. The final model for the FAb24 complexed with mouse ENTPD2 was refined with AutoBuster with good refinement statistics and overall geometry. Two Ramachandran outliers Thr122 of mouse ENTPD2 and Ala57 of the FAb24 were present in final model, both of which were well-defined in electron density. Asn129 and Asn378 were only residues where N-linked glycosylation was observed. Glu1 of the FAb24 heavy chain was observed and modeled as pyroglutamate. Mouse ENTPD2 residues omitted from final model include residues 29-35 of the N-terminus, 61-66 corresponding to loop residues connecting strands 132 and 133, residues 182-194 corresponding to the membrane interacting loop (MIL), loop residues 290-293 between α9 and β11, and C-terminal residues beyond Ala450. All heavy and light chain residues of the FAb24 were included in the final refined model except the terminal cysteine of the heavy chain Cys225.

[1170] The amino-acid sequences of the anti-mouse ENTPD2 FAb24 heavy and light chains are provided in FIG. 3C, with the CDRs underlined (as defined by Kabat, 1991, Sequences of proteins of immunological interest, NIH Publication No. 91-3242) and residues located at the Fab-antigen interface labeled with *. An overall view of the three dimensional structure of the FAb24/mENTPD2 complex is depicted in FIG. 8.

[1171] Anti-mouse ENTPD2 FAb24 engages predominantly the presumed membrane distal lobe (residues G162-E426) of the ENTPD2 antigen. An equal contribution to ENTPD2 binding is observed for CDR residues of the heavy chain and light chain variable domains.

[1172] Compared to FAb22 and FAb23 binding to human ENTPD2, the FAb24 engages the murine ENTPD2 from an entirely different direction orthogonal to what is observed in FAb22 and FAb23 complexes with hENTPD2. The FAb24 binds predominantly the murine ENTPD2 membrane distal lobe through extensive heavy chain CDR interactions and relatively few light chain CDR interactions. Heavy chain CDR1 and CDR3 residues in conjunction with light chain CDR1 and CDR2 residues bind to helices α11 and α13 of mENTPD2. Residues of heavy chain CDR2 make interactions with the interconnecting loop residues between α13 and α14. The CDR3 heavy chain CDR3 is observed in a conformation where it is bent nearly 90 degrees and adopts a shortβ-turn motif at its terminal end. Two residues of the FR3 heavy chain make sole contacts to the mouse ENTPD2 proximal lobe through interactions with β3 of the 5-stranded antiparallel sheet. No MAB13 CDRs are observed to extend far enough into the mouse ENTPD2 site to affect ATP hydrolysis activity through direct obstruction of the substrate binding site. Binding of FAb24 to murine ENTPD2 buries approximately 16300 Å2 total combined solvent-accessible surface. Epitope and paratope residues involved in direct intermolecular contacts calculated within a 4.0 Å distance cut-off are listed in Table 15 and labeled in FIGS. 3C and 4B. 22 Fab residues and 18 murine ENTPD2 residues were involved in direct intermolecular contacts and comprise the observed paratope and epitope in Fab/ENTPD2 engagement. Heavy chain CDR residues include CDR1 Thr28, Thr30, His31, Tyr32, and Gly33; CDR2 Trp50, Asn52, Thr53, and Asp54, Thr55; CDR3 Tyr99, Gly100, Thr101, Leu102, Tyr103, and Phe110. Two FR3 residues Thr74 and Ser75 from the heavy chain also contribute to binding Light chain CDR residues contributing to binding include Thr34 and Lys36 from CDR1, Tyr56 from CDR2, and Trp97 from CDR3.

TABLE 15
Epitope and paratope residues FAB24/mouse ENTPD2

| Mouse ENTPD2 epitope | | Anti-mouse ENTPD2 FAb24 paratope | |
|---|---|---|---|
| Structural | Contact | | Structural |
| element | residues | Contact residues | element |
| β3 | Ser74 | Ser75H | H-FR3 |
| | Cys75 | Ser75H | H-FR3 |
| | Asp76 | Thr74H, Ser75H | H-FR3 |
| α11 | Tyr349 | Thr28H | H-CDR1 |
| | Tyr350 | Thr28H, His31H | H-CDR1 |
| | Asp353 | Thr28H, His31H | H-CDR1 |
| | Phe354 | His31H | H-CDR1 |
| | Thr357 | Tyr32H | H-CDR1 |
| | | Thr101H, Leu102H, Tyr103H | H-CDR3 |
| | Val358 | Tyr32H | H-CDR1 |
| | | Thr101H, Tyr103H | H-CDR3 |
| α11-α12 loop | Gly360 | Tyr103H | H-CDR3 |
| α13 | Gln385 | Thr34L | L-CDR1 |
| | Ala386 | Phe110H | H-CDR3 |
| | | Lys36L | L-CDR1 |
| | | Tyr56L | L-CDR2 |
| | Arg387 | Gly100H, Thr101H | H-CDR3 |
| α13-α14 loop | Val388 | His31H | H-CDR1 |
| | Pro389 | Tyr99H, Gly100H, Phe110H | H-CDR3 |
| | | Trp97L | L-CDR3 |
| | Gly390 | Trp50H | H-CDR2 |
| | Gln391 | Thr30H, Tyr32H, Gly33H | H-CDR1 |
| | | Trp50H, Asn52H, Thr53H, | H-CDR2 |
| | | Asp54H | |
| | Thr393 | Asp54H, Thr55H | H-CDR2 |
| | Arg394 | Asp54H | H-CDR2 |
| α14 | Tyr398 | His31H | H-CDR1 |

The lists of epitope and paratope residues in direct contact were derived from the final refined coordinates with the CCP4 program NCONT, using a 4.0 Å distance cut-off.

### Example 8

### Inhibition of Tumor Growth by Anti-ENTPD2 MAB13 in Combination with Anti-PD-1 Ab in the Syngeneic B16LM3 Tumor Model

[1173] B16LM3 model was established in female C57BL/6 mice by subcutaneous injection of 0.5×10⁶ cells into the right flank of each mouse. The day after implant mice were randomized into treatment groups (n=10 per group). Mice received treatments of either anti-mouse ENTPD2 mAb13 or a non-specific mIgG2a isotype control (clone MOPC-173, BioLegend, San Diego, Calif.) at a final dose 15 mg/kg on Day 1, 5, 8, 12, 15.

[1174] Anti-PD-1 Ab (clone RMP1-14 Bio X Cell, West Lebanon, N.H.) or non-specific rIgG2a isotype control (clone RTK2758, BioLegend, San Diego, Calif.) were delivered i.p. at a final dose of 10 mg/kg on days 1, 5, 8, 12, 15. All doses were adjusted to individual mouse body weights.

[1175] All test agents were tolerated on study and no overt clinical symptoms of toxicities or body weight loss were observed in any of the treatment groups. Combination of anti-mouse ENTPD2 mAb13 with anti-PD-1 Ab treatment significantly extended mouse survival relative to No Treatment (p<0.005), Isotype Control (p<0.05) or anti-PD-1 Ab (p<0.01) (Log-rank (Mantel-Cox) test was used to determine if survival curves were significantly different)) (FIG. 9).

### Example 9

### Combination Treatment of Anti-ENTPD2 mAb13 with Anti-PD-1 Ab in the Syngeneic B16F10 Tumor Model Induces Tumor Influx of Activated T Cells

[1176] B16F10 model was established in female C57BL/6 mice by subcutaneous injection of 0.5×10⁶ cells into the right flank of each mouse. On day 7 once tumors reached approximately 30 mm³, mice were randomized according to tumor volume into treatment groups (n=10 per group). Mice received treatment of either anti-mouse ENTPD2 mAb13 at a final dose 15 mg/kg, anti-PD-1 Ab (clone RMP1-14 Bio X Cell, West Lebanon, N.H.) i.p. at a final dose of 10 mg/kg or the combination of both treatments on days 1, 5, and 8. All doses were adjusted to individual mouse body weights.

[1177] No significant anti-tumor efficacy was observed after treatment with anti-mouse ENTPD2 mAb13 or anti-PD-1 Ab alone, however a significant reduction in tumor growth relative to No Treatment control was observed in the combination arm of anti-mouse ENTPD2 mAb13 and anti-PD-1 Ab (p<0.05 One-Way ANOVA/Tukey's Multiple Comparisons Test) (FIGS. 10A-10B).

[1178] In order to understand the impact of treatments on the tumor microenvironment, mice were euthanized on day 8 and tumors were dissociated in HyClone RPMI1640 media (GE Healthcare, Pittsburg, Pa.) using gentleMacs C-tubes (Miltenyi Biotec, Auburn, Calif.) on the gentleMacs Octo Dissociator (Miltenyi Biotec, Auburn, Calif.). Approximately 2×10⁶ dissociated tumor cells were blocked with rat anti-mouse CD16/CD32 Ab (Biolegend, San Diego, Calif.) to reduce non-specific FcyRIII/II binding and subsequently stained with the following cocktail of Abs: rat anti-mouse CD45-BUV395 (clone 30-F11) (BD Biosciences, San Jose, Calif.), rat anti-mouse CD8a-BUV737 (clone 53-6.7) (BD Biosciences, San Jose, Calif.), rat anti-mouse CD4-BV510 (clone RM4-5) (BD Bioscience, San Jose Calif.), anti-mouse CD69-PercPCy5.5 (clone H1-2F3) (Biolegend, San Diego, Calif.) and rat anti-mouse CD25-eFluor450 (clone eBio3C7) (eBioscience, San Diego, Calif.) at the manufacturers' recommended dilutions. All incubations and washes were performed in FACS Buffer composed of 1× HyClone Phosphate Buffered Saline (GE Healthcare, Pittsburg, Pa.), 1% HyClone Fetal Bovine Serum (GE Healthcare, Pittsburg, Pa.), 2mM EDTA (ThermoFisher, Waltham Mass.). After staining with the cell surface antigen antibody cocktail, dissociated tumor cells were washed in FACS buffer, fixed and permeabilized using the eBioscience Foxp3/Transcription Factor Staining Buffer Kit (ThermoFisher, Waltham Mass.) to allow for intracellular staining with the mouse anti-mouse FOXP3-eFluor660 (clone 150D/E4) (eBioscience, San Diego, Calif.).

[1179] A significant influx of activated CD4 T-helper cells (defined as CD45+CD8−CD4+FOXP3−CD69+CD25+) (7.0-fold increase vs No Treatment, p<0.0001 One-Way ANOVA/Tukey's Multiple Comparisons Test) and CD8 T cells (defined as CD45+CD4−CD8+CD69+CD25+) (5.8-fold change vs No Treatment, p<0.05 One-Way ANOVA/Tukey's Multiple Comparisons Test) was observed with the Anti-mouse ENTPD2 mAb13 and Anti-PD-1 Ab combination treatment relative to all other treatment groups (FIG. 10C).

### Example 10

### Dose Dependent In Vivo Efficacy of Anti-Human ENTPD2 mAb1 and mAb6 in Combination with Anti-PD-1 Ab in the Human ENTPD2 Engineered B16LM3 Xenograft Model in C57BL/6 Mice

[1180] To demonstrate targeted anti-tumor activity of anti-human ENTPD2 Abs in vivo, a human ENTPD2-engineered model was developed, B16LM3 clone 5. This model was derived from the B16LM3 melanoma model, where endogenous mouse ENTPD2 expression was knocked out via a transient electroporation of CAS9 protein with CRISPR guide RNA sequences against mouse ENTPD2, and human ENTPD2 was overexpressed using a retroviral transduction approach. Human ENTPD2 expression in the model was confirmed in vitro by FACS with the human ENTPD2 selective anti-human ENTPD2 mAb17. Mouse ENTPD2 selective anti-mouse ENTPD2 mAb13 was used to demonstrate complete knockout of endogenous mouse ENTPD2 (FIG. 11A). B16LM3 clone B5 demonstrated comparable growth kinetics to the parental line and sustained human ENTPD2 expression in the syngeneic host (FIG. 11B).

[1181] Human ENTPD2 engineered B16LM3 clone B5 model was established in female C57BL/6 mice by subcutaneous injection of 0.5×10⁶ cells into the right flank of each mouse. Once tumors reached approximately 35-50 mm³, mice were randomized according to tumor volume into treatment groups (n=8 per group). Mice received an i.v. treatment of either anti-human ENTPD2 mAb1 or mAb6 at a final dose of 0.1, 1 or 10 mg/kg or a non-specific human IgG1 isotype control 10 mg/kg on day 1 of study. Anti-PD-1 Ab (clone RMP1-14 Bio X Cell, West Lebanon, N.H.) was dosed i.p. at a final dose of 10 mg/kg on D1 and D5. All doses were adjusted to individual mouse body weights. All test agents were tolerated on study and no overt clinical symptoms of toxicities or body weight loss were observed in any of the treatment groups (Table 16).

[1182] No significant anti-tumor efficacy was observed after treatment with anti-human ENTPD2 mAb1 or mAb6 as single agents or the combination of the non-specific isotype control and anti-PD-1 Ab. Combination regimen of anti-human ENTPD2 mAb1 with anti-PD-1 Ab (fixed dose of 10 mg/kg) demonstrated a dose dependent anti-tumor effect with AT/AC value of 18.4% (10 mg/kg), 35.7% (1mg/kg) and 33.4% (0.1 mg/kg). Similarly combination regimen of anti-human ENTPD2 mAb6 with anti-PD-1 Ab (fixed dose of 10 mg/kg) also demonstrated a dose dependent anti-tumor effect with AT/AC value of 29.2% (10 mg/kg), 27.3% (1mg/kg) and 41.0% (0.1 mg/kg) (Table 16 and FIGS. 12A-12B).

TABLE 16
Anti-human ENTPD2 Ab dose response efficacy in human ENTPD2
engineered B16LM3 clone B5 xenograft model on Day 7 of treatment.

| | Anti-human | Anti- | | | |
|---|---|---|---|---|---|
| | ENTPD2 | PD-1 | Tumor | Host Response | |
| | mAb | Ab | Response | Δ body | Survival |
| | Dose, | Dose, | ΔT/ΔC | weight | (alive/ |
| Treatment | schedule | schedule | (%) | (%) | total) |
| No Treatment | None | None | | 0.1 | 8/8 |
| Isotype + anti- | 10 mg/kg | 10 mg/kg | 61.2 | 0.0 | 8/8 |
| PD-1 Ab | dosed D 1 | dosed D 1 | | | |
| | | and D 5 | | | |
| Anti-human | 10 mg/kg | 10 mg/kg | 18.4** | −1.2 | 8/8 |
| ENTPD2 | dosed D 1 | dosed D 1 | | | |
| mAb1 + anti- | | and D 5 | | | |
| PD-1 Ab | | | | | |
| Anti-human | 1 mg/kg | 10 mg/kg | 35.7* | −2.9 | 8/8 |
| ENTPD2 | dosed D 1 | dosed D 1 | | | |
| mAb1 + anti- | | and D 5 | | | |
| PD-1 Ab | | | | | |
| Anti-human | 0.1 mg/kg | 10 mg/kg | 33.4* | −0.3 | 8/8 |
| ENTPD2 | dosed D 1 | dosed D 1 | | | |
| mAb1 + anti- | | and D 5 | | | |
| PD-1 Ab | | | | | |
| Anti-human | 10 mg/kg | 10 mg/kg | 29.2* | −1.9 | 8/8 |
| ENTPD2 | dosed D 1 | dosed D 1 | | | |
| mAb6 + anti- | | and D 5 | | | |
| PD-1 Ab | | | | | |
| Anti-human | 1 mg/kg | 10 mg/kg | 27.3* | −1.6 | 8/8 |
| ENTPD2 | dosed D 1 | dosed D 1 | | | |
| mAb6 + anti- | | and D 5 | | | |
| PD-1 Ab | | | | | |
| Anti-human | 0.1 mg/kg | 10 mg/kg | 41.0 | 0.2 | 8/8 |
| ENTPD2 | dosed D 1 | dosed D 1 | | | |
| mAb6 + anti- | | and D 5 | | | |
| PD-1 Ab | | | | | |
| Anti-human | 10 mg/kg | None | 71.7 | −0.2 | 8/8 |
| ENTPD2 mAb1 | | dosed D 1 | | | |
| Anti-human | 10 mg/kg | None | 60.0 | −0.1 | 8/8 |
| ENTPD2 mAb6 | | dosed D 1 | | | |

The experiment was evaluated on treatment Day 7, *p < 0.05 **p < 0.005 versus control No Treatment group (One-Way ANOVA/Tukey's Multiple Comparisons Test). % ΔT/ΔC = 100 ΔT/ΔC where: ΔT = mean tumor volume of the drug treated group on D7 of study − mean tumor volume of the drug treated group on initial day of dosing; ΔC = mean tumor volume of the control group on D7 of study − mean tumor volume of the control group on initial day of dosing D 1. Δ body weight (%) = (Mean body weight D28 − mean body weight D 1) *100/Mean body weight D 1 of treatment.

### Example 11

### Anti-Human ENTPD2 mAb Activity in the Human ENTPD2 Engineered B16LM3 Clone B5 Xenograft Model in C57BL/6 Mice

[1183] In order to understand immediate impact of ENTPD2 blockade from immune pathway engagement perspective, plasma and B16LM3 clone B5 tumors (mean tumor volume ˜170 mm³) were collected from C57BL/6 mice 24 hr after treatment with anti-human ENTPD2 mAb1 or Isotype Control at 10 mg/kg. Anti-human ENTPD2 mAb1 is not mouse ENTPD2 cross-reactive, so any cytokine modulation in the periphery would be reflective of changes in tumor microenvironment.

[1184] Briefly, plasma was isolated via collection of blood into Microvette MV-H-300 Capillary Plasma Lithium Heparin Blood Collection tube (Sai Infusion technologies, Lake Villa, Ill.), that were spun down at 1000-2000 ×g for 10 min. Plasma samples were stored at −80° C. until use. Tumor samples were surgically excised and immediately frozen in liquid nitrogen. Tumor tissue was then homogenized in T-PER Tissue Protein Extraction Reagent (ThermoFisher, Waltham, Mass.) using the TissueLyser (Qiagen, Germany) instrument. Tumor lysate samples were spun down at 11,000 rpm for 15 min and supernatants were collected for protein concentration analysis using Pierce BCA Protein Assay Kit (ThermoFisher, Waltham, Mass.). 200 μg of protein or 25 μl of undiluted plasma was used for cytokine analysis using the V-PLEX Mouse Cytokine 29-Plex Kit (MSD, Rockville, Md.) according to manufacturer's recommendations.

[1185] A significant decrease in plasma MCP1 (p<0.05 Unpaired T-Test), accompanied by an approximately 2-fold increase in MCP1 at the tumor site was observed with anti-human ENTPD2 mAb1 treatment (FIGS. 13B and 13D), potentially reflecting myeloid cell engagement and recruitment to the tumor site. In addition, an approximately 2-fold decrease of IL-1β was observed in plasma from anti-human ENTPD2 mAb1 treated animals (p=0.05 Unpaired T-Test) and a trend suggesting a parallel reduction at the tumor site (FIGS. 13A and 13C).

### Example 12

### Anti-Human ENTPD2 mAb Activity in Combination with A2AR Antagonist in the Human ENTPD2 Engineered B16LM3 Clone B5 Xenograft Model in C57BL/6 Mice

[1186] Human ENTPD2-engineered B16LM3 clone B5 was established in female C57BL/6 mice by subcutaneous injection of 0.5×10⁶ cells into the right flank of each mouse. Once tumors reached approximately 50 mm³, mice were randomized according to tumor volume into treatment groups (n=8 per group). Mice received an intravenous (i.v.) treatment of either anti-ENTPD2 mAb1 at a final dose of 10/mg/kg or a non-specific human IgG1 isotype control 10 mg/kg on day 1 of study. NIR178 was administered per os (p.o.) for 4 days on and 3 days off, starting at the beginning of study at either 50 mg/kg or 200 mg/kg. All doses were adjusted to individual mouse body weights. The study was carried out for thirteen days post treatment initiation and tumor volumes were assessed every other day to assess efficacy. All test agents were tolerated on study and no overt clinical symptoms of toxicities or body weight loss were observed in any of the treatment groups (Table 17).

TABLE 17
In vivo efficacy of anti-human ENTPD2 Ab and A2AR antagonist in human
ENTPD2 engineered B16LM3 clone B5 xenograft model on Day 13 of treatment.

| | Anti-human | | | | |
|---|---|---|---|---|---|
| | ENTPD2 or | | | | |
| | isotype | NIR178 or | Tumor | Host Response | |
| | mAb | Vehicle | Response | ΔBody | |
| | Dose, | Dose, | ΔT/ΔC | weight | |
| Treatment | schedule | schedule | (%) | (%) | Survival (alive/total) |
| No Treatment | None | None | | −2.2 | 6/8 |
| Vehicle + hIgG1 | 10 mg/kg, | 4 d ON/3 d | 96.9 | −2.0 | 6/8 |
| Isotype | dosed D 1 | OFF | | | |
| NIR178 + hIgG1 | 10 mg/kg, | 50 mg/kg, | 123.6 | −1.4 | 7/8 |
| Isotype | dosed D 1 | 4 d ON/3 d | | | |
| | | OFF | | | |
| NIR178 + hIgG1 | 10 mg/kg, | 200 mg/kg, | 93.3 | −2.5 | 6/8 |
| Isotype | dosed D 1 | 4 d ON/3 d | | | |
| | | OFF | | | |
| NIR178 + Anti- | 10 mg/kg | 50 mg/kg, | 61.6 | 1.3 | 8/8 |
| human ENTPD2 | dosed D 1 | 4 d ON/3 d | | | |
| mAb1 | | OFF | | | |

The experiment was evaluated on treatment Day 13. % ΔT/ΔC = 100 ΔT/ΔC where: ΔT = mean tumor volume of the drug treated group on D 13 of study − mean tumor volume of the drug treated group on initial day of dosing; ΔC = mean tumor volume of the control group on D 13 of study − mean tumor volume of the control group on initial day of dosing D 1. Δ Body weight (%) = (Mean body weight D28 − mean body weight D 1) *100/Mean body weight D 1 of treatment.

[1187] No significant anti-tumor efficacy was observed after treatment with the combination of the non-specific isotype control and the A2AR antagonist, NIR178, at either 50 or 200 mg/kg. The combination regimen of anti-ENTPD2 mAb1 (10 mg/kg) with NIR178 (50 mg/kg) demonstrated an anti-tumor effect with T/AC value of 61.6% (Table 17 and FIG. 14). These data suggest that there is enhanced anti-tumor efficacy when blocking multiple nodes in the adenosine pathway.

### Example 13

### Assessment of Anti-ENTPD2 Abs in the Biochemical and Cell-Based Functional Assays

[1188] Biochemical and cell-based functional assays were developed in-house to understand functional impact of anti-ENTPD2 Abs against purified extracellular domain of ENTPD2 (residues 29-462), as well as against the fully intact protein in the context of the native cell-based conformation. ENTPD2 hydrolyzes ATP to ADP, which can subsequently be detected using the HTRF Transcreener ADP2 TR-FRET Red Assay (BellBrook Labs, Madison, Wis.) where ENTPD2-produced ADP would compete with the ADP Tracer for binding to the anti-ADP-Tb antibody. The resulting signal is inversely proportional to the concentration of ADP in the sample.

[1189] To evaluate activity of anti-ENTPD2 Abs in the ENTPD2 biochemical assay, anti-ENTPD2 Abs and recombinant ENTPD2 (residues 29-462) were diluted in reaction buffer (50 mM HEPES, pH 7.1, 10 mM MgCl₂, 0.01% BSA) to the desired concentration. 4 μL per well of the ENTPD2 solution and 2 μL per well of the Anti-ENTPD2 Ab solution were transferred into a ProxiPlate (PerkinElmer, Waltham, Mass.) and incubated for 30 min at room temperature. Reaction was then initiated via addition of 2 μl of ATP (final assay concentration of 1 μM), and the sample was incubated for 25 min at room temperature. Reaction was quenched with 200 mM EDTA/200 mM EGTA (5 μL per well) and detection reagents were added to wells (5 μL per well), with a final concentration of 4 nM ADP2 antibody and 4 nM ADP Tracer in well (BellBrooks Labs, Madison, Wis.). Plate was then incubated at room temperature for 60 min before measuring the HTRF signal.

[1190] To establish cell-based functional assays, human/cyno/mouse ENTPD2-engineered NIH/3T3 cells or RKO (ATCC, Manassa Va.) colorectal cancer cells with endogenous ENTPD2 expression were plated overnight at 150, 200 and 250 cells per well for NIH/3T3 mouse, cyno and human ENTPD2 lines, respectively, or 1000 cells per well for RKO in 384-well tissue culture plate, in 30 μl per well (Perkin Elmer, Waltham, Mass.). The following day cells were pre-incubated with Anti-ENTPD2 Abs in dose response for 60 min at 37° C., 5% CO₂ (10 μl of 5× antibody dose per well), and subsequently stimulated with a final concentration of 10 μM ATP (Teknova, Hollister, Calif.) for 20 minutes at room temperature (10 μl of 5× (50 μM) ATP per well). Reactions were quenched with 40 mM EDTA/40 mM EGTA, 25 μl per well, and 15 μl of quenched media was transferred to low volume Proxiplates (PerkinElmer, Waltham, Mass.) for ADP detection. ADP production was detected with the Transcreener ADP2 TR-FRET Red Assay (BellBrook Labs, Madison, Wis.) with a final concentration of 4 nM ADP2 antibody and 13.4 nM of ADP Tracer in wells (4× solution was prepared and 5 μL of “Detection Reagent Mix” was added to the quenched conditioned media). Plates were incubated with detection reagents for 1 hour at room temperature prior to reading plates in HTRF mode.

[1191] HTRF signal (Emission at 620 nm and 665 nm) was assessed in both assays using the Envision plate reader in HTRF mode (Perkin Elmer, Waltham, Mass.). HTRF ratio was determined using the following formula: HTRF ratio=R=Emission at 665 nm/Emission at 620 nm×10,000. Subsequently % Residual Activity and % Inhibition were determined as follows:

$$\% Residual Activity = \frac{( R - {R}_{0 \%} )}{( {R}_{100 \%} - {R}_{0 \%} )} * 100 ;$$

$$\% Inhibition = 100 - [ \frac{( R - {R}_{0 \%} )}{( {R}_{100 \%} - {R}_{0 \%} )} * 100 ] .$$

[1192] Where R₀% is the HTRF ratio of the negative control (0% enzyme activity), and R₁₀₀% is the HTRF ratio of the positive control (100% enzyme activity). Data were analyzed in Microsoft Excel and graphed using GraphPad's Prism 7.0 software and IC₅₀ values were obtained using non-linear regression, log (agonist) vs. response-variable slope (four parameters) analysis.

### Representative Activity of Anti-ENTPD2 Abs in the Biochemical Human ENTPD2 Functional Assay

[1193] Anti-ENTPD2 Abs from the hybridoma and phage display campaigns were triaged for functional activity in the biochemical human ENTPD2 assay. Representative activity of Anti-ENTPD2 Abs and their IC₅₀s are shown in FIG. 15 and Table 18. A range of activities was observed for a number of Abs with some displaying very potent activity in the assay with sub-nanomolar IC₅₀ and complete target inhibition or others demonstrating much weaker activity and only partial enzyme inhibition (data not shown).

TABLE 18
In vitro activity profiles of Anti-ENTPD2 Abs in the human
ENTPD2 biochemical functional assay

| | ENTPD2 Biochemical Assay at 1 uM ATP |
|---|---|
| Antibody | IC₅₀ (nM) |
| Anti-ENTPD2 mAb1 | 0.52 |
| Anti-ENTPD2 mAb16 | 77.33 |
| Anti-ENTPD2 mAb17 | 0.27 |
| Anti-ENTPD2 mAb19 | 4.09 |
| Anti-ENTPD2 mAb20 | 17.49 |
| Anti-ENTPD2 mAb21 | 0.87 |

### Activity of Anti-ENTPD2 Abs in the Cell-Based Human and Cyno ENTPD2 Functional Assays

[1194] Initial profiling of Abs in the biochemical ENPTD2 assay identified a number of potent hits with strong inhibitory activity against the recombinant extracellular domain of ENTPD2, however differential behavior profiles were observed for a subset of Abs between the biochemical and cell-based functional assays, suggesting that conformational differences may exist between the purified recombinant protein and the native cell-based conformation (data not shown). In order to confirm potent activity of Abs against native ENTPD2, anti-ENTPD2 Abs were profiled for inhibitory activity using human- or cyno-ENTPD2 engineered NIH/3T3 cells or the RKO cell line with endogenous ENTPD2 expression. Summary of anti-ENTPD2 Abs activity profiles across the human or cyno ENTPD2 NIH/3T3 or RKO cell-based assays is captured in Table 19. Representative graphs depicting potent activity across all three functional assays for a subset of anti-ENTPD2 Abs are shown in FIG. 16.

TABLE 19
In vitro activity profiles of ENTPD2 selective Abs in the human or cyno
ENTPD2 NIH/3T3 or RKO cell-based assays

| | Human ENTPD2 | | | | Cyno ENTPD2 | |
|---|---|---|---|---|---|---|
| | NIH/3T3 Assay | | RKO Assay | | NIH/3T3 Assay | |
| | IC₅₀ | % | IC₅₀ | % | IC₅₀ | % |
| Antibody | (nM) | inhibition | (nM) | inhibition | (nM) | inhibition |
| Anti-ENTPD2 mAb1 | 1.1 | 92 | 0.8 | 97 | 4.1 | 91 |
| Anti-ENTPD2 mAb2 | 1.4 | 98 | 0.8 | 86 | 2.7 | 84 |
| Anti-ENTPD2 mAb3 | 1.8 | 91 | 1.6 | 95 | 5.8 | 84 |
| Anti-ENTPD2 mAb4 | 0.2 | 87 | 0.2 | 74 | 2.2 | 75 |
| Anti-ENTPD2 mAb5 | 0.3 | 95 | 0.2 | 80 | 1.5 | 80 |
| Anti-ENTPD2 mAb6 | 0.3 | 95 | 0.2 | 90 | 3.3 | 73 |
| Anti-ENTPD2 mAb7 | 0.8 | 95 | 0.6 | 92 | 2.7 | 82 |
| Anti-ENTPD2 mAb8 | 0.1 | 97 | 0.2 | 95 | 0.9 | 96 |
| Anti-ENTPD2 mAb9 | 0.3 | 92 | 0.1 | 70 | 0.3 | 71 |
| Anti-ENTPD2 mAb10 | 0.4 | 88 | 0.2 | 77 | 0.5 | 86 |
| Anti-ENTPD2 mAb12 | 1.5 | 55 | | | | |
| Anti-ENTPD2 mAb12 | 26.6 | 68 | | | | |
| Anti-ENTPD2 mAb16 | >133 | 30 | | | >133 | 5 |
| Anti-ENTPD2 mAb17 | 0.6 | 98 | 0.5 | 96 | 1.0 | 91 |
| Anti-ENTPD2 mAb18 | 0.4 | 88 | | | 20 | 68 |

### Example 14

### Structure Guided Engineering Identified More Potent Surrogate Anti-Mouse ENTPD2 Abs

[1195] Anti-ENTPD2 mAb13 was identified as a mouse ENTPD2 selective Ab (FACS EC₅₀ 3-4 nM) with no binding to human or cyno ENTPD2. Activity of Anti-ENTPD2 mAb13 was assessed using the NIH3T3-mouse ENTPD2 engineered cell line, where Anti-ENTPD2 mAb13 displayed activity as a partial enzymatic inhibitor with a 2.8 nM IC₅₀ and maximum 44% target inhibition. Examination of the Anti-ENTPD2 mAb13 Fab/mENTPD2 complex crystal structure and superposition of ATP-substrate analog from PDB code 3CJA rENTPD2 within the mENTPD2 active site, revealed T30 in CDR1 of the Anti-ENTPD2 mAb13 HC as an optimal site where substitution of larger amino acid would be predicted to sterically block ATP binding A subset of constructs with substitutions at the T30 position of Anti-ENTPD2 mAb13 CDR1 were engineered, including Anti-ENTPD2 mAb14 and mAb15. Evaluation of engineered variants of Anti-ENTPD2 mAb14 and mAb15 in the mouse ENTPD2 NIH/3T3 cell-based functional assay, demonstrated significantly improved target inhibition as compared to the parental Anti-ENTPD2 mAb13, reaching approximately 76-79% mouse ENTPD2 inhibition with a 5-6 nM IC50 (Table 24, FIG. 17).

TABLE 24
In vitro activity profiles of mouse ENTPD2 selective Abs
in the mouse ENTPD2 cell-based functional assay

| | ENTPD2 Functional | % Inhibition |
|---|---|---|
| Antibody | Assay IC50 (nM) | at 100 nM (±Std Err) |
| Anti-ENTPD2 mAb13 | 2.8 | 44 ± 7.3 |
| Anti-ENTPD2 mAb14 | 4.6 | 79 ± 2.2 |
| Anti-ENTPD2 mAb15 | 5.9 | 76 ± 3.4 |

### Example 15

### Functional Activity of Anti-ENTPD2 mAb1 in a FcγR IIIc Signaling Assay

[1196] Anti-ENTPD2 mAb1 is a human IgG1 antibody and therefore has the potential to signal through FcγR Ma and induce ADCC/ADCP resulting in the depletion of cells which express ENTPD2. In order to assess the capabilities of anti-ENTPD2 mAb1 to induce ADCC we developed a surrogate ADCC assay utilizing RKO colorectal carcinoma cells which express 46-68,000 molecules of ENTPD2 on the cell surface. These RKO cells were mixed with engineered Jurkat cells expressing the human FcγRIIIa, V158 (high affinity variant) and an NFAT-luciferase reporter at a ratio of 15 Jurkat: 1 RKO. After addition of anti-ENTPD2 mAb1 to the cells the plates were incubated for 5 hr at 37° C., 5% CO₂ and then transferred to RT for 15 min. The level of luciferase activity was measured with Bright Glo. The EC₅₀ was obtained using non-linear regression analysis. In FIG. 18 anti-ENTPD2 mAb1 was shown to mediate FcγRIIIa signaling with an EC₅₀ of 17.3 nM (2.55 μg/mL).

### Example 16

### Cynomolgus Monkey Pharmacokinetics

[1197] A cynomolgus monkey single dose and multiple dose pharmacokinetic non-GLP study, 4-week cynomolgus monkey non-GLP toxicology study and 4-week cynomolgus monkey GLP toxicology study were conducted with anti-ENTPD2 mAb1.

[1198] The plasma exposure of anti-ENTPD2 mAb1, an ENTPD2 antibody was determined in male cynomolgus monkey following one or two intravenous doses at 3, 10, 30 and 100 mg/kg. The interval between the two consecutive doses was 14 days. All animals receiving anti-ENTPD2 mAb1 were exposed to the test article. The plasma exposure of anti-ENTPD2 mAb1 after a single i.v. dose increased more than dose proportionally from 3 to 10 mg/kg. A 3.3-fold increase in dose resulted in a 5.3-fold increase of AUC(0-336h) and 5.9-fold increase in AUC(0-inf). The plasma clearance of anti-ENTPD2 mAb1 decreased from approximately 12 to 7 mL/day/kg when the dose increased from 3 to 10 mg/kg, indicating non-linear elimination which may be attributed to target mediated drug disposition (TMDD). In the dose range 10 to 100 mg/kg, the plasma exposure of anti-ENTPD2 mAb1 increased proportionally with the dose. A 10-fold increase in dose resulted in approximately 9.5-fold increase in both AUC(0-336h) and AUC(0-inf), indicating linear pharmacokinetics at doses equal or above 10 mg/kg. The plasma clearance was approximately 7 ml/day/kg in the dose range 10 to 100 mg/kg, suggesting that the non-linear elimination was saturated at dose 10 mg/kg and higher.

[1199] Anti-drug antibody (ADA) formation was also examined in this study. The ADA was only detected in one (10 mg/kg) of nine animals used in the study. The presence of ADA reduced the plasma exposure of anti-ENTPD2 mAb1 in the ADA-positive animal.

[1200] Plasma anti-ENTPD2 mAb1 concentrations for each dose group is plotted in FIG. 19. Mean PK parameters for each dose group are listed in Table 21.

TABLE 21
Mean (n = 3) PK parameters in male cynomolgus monkey: anti-ENTPD2
mAb1 single and multiple dose PK study (3, 10, 30 and 100 mg/kg) i.v.

| | | | | | | AUC | AUC | |
|---|---|---|---|---|---|---|---|---|
| | | | AUC | AUC | | (0-inf)/D | (0-336 h)/D | Cmax/D |
| | Dose | Study | (0-inf) | (0-336 h) | Cmax | (μg * h/mL/ | (μg * h/mL/ | (μg/mL/ |
| Group | mg/kg | Day | (μg * h/mL) | (μg * h/mL) | (μg/mL) | mg/kg) | mg/kg) | mg/kg) |
| 1 | 3 | 1 | 6′127 | 5′682 | 100 | 2′042 | 1′894 | 33 |
| 2 | 10 | 1 | 36′032 | 30′375 | 352 | 3′603 | 3′037 | 35 |
| | 10 | 15 | 44′736 | 34′185 | 374 | 4′474 | 3′419 | 37 |
| 3 | 30 | 1 | 114′332 | 94′338 | 1′268 | 3′811 | 3′145 | 42 |
| | 100* | 15 | 420′568 | 325′507 | 3′270 | 4′083 | 3′160 | 32 |

Note:
*100 mg/kg on day 15, at pre-dose there was ~3 mg/kg dose carryover. The exposures, AUC(0-inf), AUC(0-336 h) and Cmax, were normalized with 103 mg/kg

### Example 17

### A Phase I/Ib, Open-Label, Multi-Center, Study of Anti-ENTPD2 mAb1 as a Single Agent and in Combination with Spartalizumab, Anti-CD73 mAb 373 and NIR178 in Patients with Advanced Solid Tumors

[1201] Study Design

[1202] This study (FIG. 20) is a FIH, open-label, phase I/Ib, multi-center study which consists of a dose escalation part of anti-ENTPD2 mAb1 as a single agent and in combination with Spartalizumab, anti-CD73 mAb 373 or NIR178, followed by an expansion part. Moreover, an optional triple combination may be considered after evaluation of all safety and efficacy data and the MTD/RD for the doublet combinations have been determined. Enrollment will be limited to subjects with MSS CRC, cholangiocarcinoma, pancreatic cancer, esophageal, EGJ or gastric cancer.

[1203] During the escalation part, the first dose for the first two subjects treated at an untested dose level of anti-ENTPD2 mAb1, either as single agent (FIG. 21). or in combination with Spartalizumab (FIG. 22), NIR178 (FIG. 23) or, anti-CD73 mAb 373 (FIG. 24) will be staggered by 24 hours. The dose escalation of the combination may start after at least 2 dose levels of anti-ENTPD2 mAb1 single agent have been determined to be safe and tolerable. Once the RD or MTD of anti-ENTPD2 mAb1 as single agent and anti-ENTPD2 mAb1 in combination with Spartalizumab, anti-CD73 mAb 373 or NIR178 are determined, the corresponding expansion part(s) may commence.

[1204] Rationale for Study Design

[1205] The design of this phase I/Ib, open label study was chosen to characterize the safety, tolerability, determine a recommended dose(s), and estimate the anti-tumor activity of anti-ENTPD2 mAb1 as a single agent and in combination with either Spartalizumab, an anti-CD73 Ab or NIR178 in subjects with select advanced malignancies. Where necessary, the dose escalation allows the MTD/RD of anti-ENTPD2 mAb1 as a single agent and in combination with Spartalizumab, anti-CD73 mAb 373 or NIR178 to be established and will be guided by the Bayesian Hierarchical Logistic regression model (BHLRM).

[1206] The BHLRM is a well-established method to identify the MTD in cancer subjects. The adaptive BHLRM will be guided by the escalation with overdose control (EWOC) principle to control the risk of DLT in future subjects on study. The use of Bayesian response adaptive models for small datasets has been accepted by EMEA (“Guideline on clinical trials in small populations”, Feb. 15, 2007) and endorsed by numerous publications (Babb et al 1998, Neuenschwander B, et al (2008) Critical aspects of the Bayesian approach to phase I cancer trials. Statistics in Medicine, 27(13):2420-39, Bailey et al 2009), and its development and appropriate use is one aspect of the FDA's Critical Path Initiative.

[1207] The study consists of two parts, dose escalation and dose expansion. The dose escalation part of the study will initially evaluate anti-ENTPD2 mAb1 biweekly (Q2W) dosing and may include evaluations of different dosing schedules as described in Table 22 (e.g. Q4W) for anti-ENTPD2 mAb1, along with doublet combinations of anti-ENTPD2 mAb1 in combination with Spartalizumab, anti-ENTPD2 mAb1 in combination with NIR178 and anti-ENTPD2 mAb1 in combination with anti-CD73 mAb 373. The different dosing schedules provide options to address possible need for higher antibody doses to reach target saturation and/or emerging PK/PD data that supports dosing at longer intervals. Optional triplet combinations of anti-ENTPD2 mAb1 in combination with Spartalizumab and NIR178 and anti-ENTPD2 mAb1 in combination with Spartalizumab and anti-CD73 mAb 373 and anti-ENTPD2 mAb1 in combination with NIR178 and anti-CD73 mAb 373 may be evaluated on the basis of emerging safety, PK and efficacy data.

[1208] The triple combination cohorts will allow doses to be escalated up to the single agent MTD declared in the single agent studies of these compounds (e.g. 480 mg NIR178 BID and 400 mg Spartalizumab (PDR001) Q4W. No compound will be escalated more than 100%, and only one study treatment at a time will be escalated. During the dose escalation portion of the study, cohorts of 3 to 6 evaluable patients will be treated with anti-ENTPD2 mAb1 with combination partners, until the MTD is reached or a lower recommended dose (RD) is established. To assure that the RD does not exceed the MTD, each dose escalation will be guided by an adaptive BHLRM following the EWOC principle. In the event that all dose levels for a group are considered too toxic, then no MTD or RD for the treatment and schedule will be defined and enrollment in that treatment group will be discontinued.

[1209] The dose and schedule determined in the escalation part will be used for the dose expansion part where subjects will be treated at the RDs for single agent (optional), and combinations. The combination expansion in MSS CRC begins once the RD has been established. The combination expansions in other selected tumors are optional, and may start if single agent or combination efficacy has been seen.

[1210] Rationale for Choice of Combination Drugs

[1211] High levels of ENTPD2, together with CD73 and A2AR, have been found in esophageal, gastric, colorectal, cholangiocarcinoma and pancreatic cancer (See FIG. 25) and analysis of TCGA data sets has shown that A2AR and CD39 RNA expression correlated with an immune signature whereas ENTPD2 is anti-correlated with immune signatures (see FIG. 26). CD73 is expressed in both immune and tumor cells. It is hypothesized that anti-ENTPD2 mAb1 in combination with anti-CD73 mAb 373 or an A2aR inhibitor (NIR178) may enhance the anti-tumor effect. Moreover, considering the expected increase of immune cell infiltration within the tumor, a combination with an anti-PD-1 antibody (Spartalizumab) might further increase tumor killing capacity.

[1212] In vivo treatment with anti-ENTPD2 mAb1 led to delayed tumor growth of a B16 syngeneic cell line, expressing human ENTPD2, when combined with an anti-PD-1 antagonistic mAb or the A2aR antagonist, NIR178. Anti-ENTPD2 mAb1 treatment of syngeneic tumors resulted in an increase in intratumoral M1 macrophages.

[1213] The combination of CD73 and PD-1 blockade demonstrated striking synergistic efficacy in MC38-OVA (colon cancer) subcutaneous tumors with complete tumor rejection in all mice (Beavis P A, Divisekera U, Paget C, et al (2013) Blockade of A2a receptors potently suppresses the metastasis of CD73+ tumors. Proc Natl Acad Sci USA; 110(36)14711-16).

[1214] Some inclusion criteria for subjects eligible for inclusion in this study:
[1215] Adult men and women ≥18 years of age.
[1216] Histologically confirmed and documented advanced malignancies (locally advanced malignancies, non-curable by surgery or radiotherapy and metastatic disease) with documented progression following standard therapy, or for whom, in the opinion of the investigator, no appropriate standard therapy exists. Disease must be measurable as determined by RECIST v1.1.
[1217] Must have a site of disease amenable to biopsy and be a candidate for tumor biopsy according to the treating institution's guidelines. The subject must be willing to undergo a new tumor biopsy at screening and during treatment.
[1218] ECOG performance status of <2
[1219] Subjects must have measurable disease, defined as at least one lesion that can be accurately measured in at least one dimension (longest diameter to be recorded for non-nodal lesions and short axis for nodal lesions) as >20 mm with conventional techniques or as >10 mm with spiral computer tomography (CT) scan, Magnetic Resonance Imaging (MRI), or calipers by clinical exam.
[1220] Note: If prior treatment was discontinued due to toxicity, subject must have continued evidence of measurable or evaluable disease.

[1221] Some exclusion criteria for subjects in this study:
[1222] Symptomatic or uncontrolled brain metastases requiring concurrent treatment, inclusive of but limited to surgery, radiation and/or corticosteroids. Subjects with treated symptomatic brain metastases should be neurologically stable for 4 weeks post-treatment prior to study entry and at doses ≤10 mg per day prednisone or equivalent for at least 2 weeks before administration of any study treatment.
[1223] Has a known additional malignancy that is progressing or requires active treatment within the past 3 year(s). Exceptions include basal cell carcinoma of the skin or squamous cell carcinoma of the skin that has undergone potentially curative therapy or in situ cervical cancer or other tumors that will not affect life expectancy.
[1224] Active previously documented or suspected autoimmune disease within the past 2 years except for the following:
   [1225] Subjects with vitiligo, type I diabetes, residual hypothyroidism only requiring hormone replacement, psoriasis not requiring systemic treatment or conditions not expected to recur should not be excluded. History of or current interstitial lung disease or non-infectious pneumonitis grade ≥2
   [1226] For Japan only—Subjects with a history or presence of drug and/or non-drug-induced interstitial lung disease (ILD) or pneumonitis ≥Grade 2.
[1227] Active or prior documented inflammatory bowel disease (e.g., Crohn's disease, ulcerative colitis)
[1228] History of severe hypersensitivity reactions to any ingredient of study drug(s) and other mAbs and/or their excipients.
[1229] Subjects having out of range lab values during screening and before the first dose of study treatment. Out of range lab values are defined as:
   [1230] Absolute neutrophil count (ANC) <1.0×10⁹/L
   [1231] Platelets <75×10⁹/L
   [1232] Hemoglobin (Hgb) <9 g/dL
   [1233] Serum creatinine >1.5× ULN or creatinine clearance <40 mL/min using Cockcroft-Gault formula
   [1234] Total bilirubin >1.5× ULN, except for subjects with Gilbert's syndrome >3.0× ULN or direct bilirubin >1.5× ULN
   [1235] Aspartate transaminase (AST) >3× ULN
   [1236] Alanine transaminase (ALT) >3 × ULN
   [1237] Serum electrolytes grade ≥2 despite adequate supplementation.
[1238] Impaired cardiac function or clinically significant cardiac disease, including any of the following:
   [1239] Clinically significant and/or uncontrolled heart disease such as congestive heart failure requiring treatment (NYHA Grade ≥2), uncontrolled hypertension or clinically significant arrhythmia
   [1240] Subjects with corrected QT using the Fridericia's correction (QTcF) >470 msec for females or >450 msec for males, on screening ECG or congenital long QT syndrome
   [1241] Acute myocardial infarction or unstable angina <3 months prior to study entry
   [1242] History of stroke or transient ischemic event requiring medical therapy
   [1243] Symptomatic claudication
[1244] Systemic anti-cancer therapy within 2 weeks of the first dose of study treatment. For cytotoxic agents that have major delayed toxicity, e.g. mitomycin C and nitrosoureas, 6 weeks are mandated as washout period Non-palliative radiotherapy within 2 weeks prior to the first dose of study treatment.
[1245] Palliative radiotherapy to a limited field, such as for the treatment of bone pain or a focally painful tumor mass is allowed. To allow for assessment of response to treatment, subjects must have remaining measurable disease that has not been irradiated.
[1246] Major surgery within 2 weeks of the first dose of study treatment (mediastinoscopy, insertion of a central venous access device, and insertion of a feeding tube are not considered major surgery).
[1247] Infections:
   [1248] HIV infection
   [1249] Active HBV or HCV infection (per institutional guidelines). Subjects with chronic HBV or HCV disease that is controlled under antiviral therapy (except interferon) are allowed in the expansion parts but not in the escalation parts.
   [1250] Known history of tuberculosis
   [1251] Infection requiring systemic antibiotic therapy. Subjects requiring systemic antibiotics for infection must have completed treatment before screening is initiated.
[1252] Use of any live vaccines against infectious diseases within 4 weeks of initiation of study treatment.
[1253] Presence of Grade ≥2 toxicity according to National Cancer Institute (NCI) Common Terminology Criteria for Adverse Events (CTCAE), from prior cancer therapy with the exception of neuropathy (inclusion of subjects with neuropathy of Grade 2 or less is permitted), ototoxicity, and alopecia.
   [1254] Systemic chronic steroid therapy (>10 mg/day prednisone or equivalent) or any immunosuppressive therapy, other than replacement-dose steroids in the setting of adrenal insufficiency, within 7 days of the first dose of study treatment. Topical, inhaled, nasal and ophthalmic steroids are allowed.
   [1255] Use of hematopoietic colony-stimulating growth factors (e.g. G-CSF, GM-CSF, M-CSF), thrombopoietin mimetics or erythroid stimulating agents ≤2 weeks prior to start of study treatment. If thrombopoietin mimetics or erythroid stimulating agents were initiated more than 2 weeks prior to the first dose of study treatment and the subject is on a stable dose, they can be maintained.

[1256] Study Treatment

[1257] For this study, the terms “investigational drug” or “study drug” refer to anti-ENTPD2 mAb1, an anti-CD73 Ab, Spartalizumab (PDR001), and NIR178. The study treatment is defined as anti-ENTPD2 mAb1 alone or in combination with Spartalizumab (PDR001), anti-CD73 mAb 373 or NIR178.

[1258] All dosages prescribed and dispensed to subjects and all dose changes during the study must be recorded in the appropriate dosage administration record eCRF.

### Investigational and Control Drugs

TABLE 22
Investigational drug

| Investigational | | | | | | |
|---|---|---|---|---|---|---|
| Drug | | | Frequency | | | |
| (Name and | Pharmaceutical | | and or | Route of | Supply | Sponsor |
| Strength) | Dosage Form | Dose | regimen | Administration | Type | (global) |
| anti-ENTPD2 | Concentrate for | 100 mg | Q2W or | Intravenous | Open | Sponsor |
| mAb1 | Solution for | starting | Q4W | use | label | (global) |
| 150 mg/1 mL | infusion | dose | | | bulk | |
| | | | | | supply; | |
| | | | | | vials | |
| Spartalizumab | Concentrate for | 400 mg | Q4W | Intravenous | Open | Sponsor |
| (PDR001) | solution for | | | use | label | (global) |
| 100 mg/4 mL | infusion | | | | bulk | |
| | | | | | supply; | |
| | | | | | vials | |
| NIR178 | Capsule | 160 mg | BID | Oral use | Open | Sponsor |
| 40 mg, 80 mg, | | starting | | | label | (global) |
| 160 mg | | dose | | | bulk | |
| | | | | | supply; | |
| | | | | | bottles | |
| Anti-CD73 | Powder for | 400 mg | Q2W | Intravenous | Open | Sponsor |
| mAb 373 | solution for | starting | | use | label | (global) |
| 100 mg | infusion | dose | | | bulk | |
| | | | | | supply; | |
| | | | | | vials | |

Anti-ENTPD2 mAb1, Anti-CD73 mAb 373 and Spartalizumab (PDR001)

[1260] Anti-ENTPD2 mAb1 will be administered by IV infusion over 1 hour (up to 2 hours if clinically indicated) at the frequency specified for the treatment group.

[1261] Anti-CD73 mAb 373 will be administered by IV infusion over 1 hour (up to 2 hours if clinically indicated) at the frequency specified for the treatment group.

[1262] Spartalizumab (PDR001) will be administered via IV infusion over 30 minutes (up to 2 hours if clinically indicated) at the frequency specified for the treatment group.

[1263] When given in combination, anti-ENTPD2 mAb1, anti-CD73 mAb 373 or Spartalizumab (PDR001) are to be administered on the same day using separate infusion materials (bag, lines, filters) for each infusion. The same access site may be used for both infusions. Anti-ENTPD2 mAb1 will be infused first followed by a break before infusing either anti-CD73 mAb 373 or Spartalizumab. The same administration sequence should be followed for all subjects. Anti-ENTPD2 mAb1 as a single agent or when combined with anti-CD73 mAb 373 or Spartalizumab, subjects should be observed for at least 4 hours for Cycle 1 Day 1 and Cycle 1 Day 15 infusions. Starting on Cycle 2 Day 1, subjects should then be monitored for approximately 2 hours after the last infusion with study treatment or per local guidelines for IV infusion.

[1264] If an infusion reaction occurs after administration of investigational drug, the subsequent study treatment infusion must be delayed until it is safe for the subject to study treatment based on the clinical discretion of the investigator.

[1265] The next dose of study treatment in a cycle may be delayed by up to 7 days for any reason. If the next dose(s) cannot be administered within the above mentioned 7-day window due to persisting AEs, then the dose(s) should be skipped. Dosing may be resumed upon resolution/improvement of the AE on Day 1 of the next cycle and the assessment schedule will be shifted accordingly.

### NIR178

[1266] NIR178 capsules will be taken orally twice daily (BID) continuously. On the visits where anti-ENTPD2 mAb1 as single agent or in combination will be administered, the dose of NIR178 should be taken first. A break between NIR178 administration and subsequent infusion of investigational drug is not required. The infusion should be started as soon as possible and not more than 60 minutes after NIR178 is given.

[1267] Subjects should take NIR178 twice (BID) daily at approximately the same time each day in the morning and evening On days that PK samples are obtained, the subject should take NIR178 during the clinic visit after the pre-dose PK samples and prior to post-dose PK samples, as instructed by the study staff.

[1268] Subjects should take NIR178 on an empty stomach at least 1 hour before or 2 hours after a meal. Each dose may be taken with a glass of water (approximately 8 ounces or approx. 235 mL).

[1269] Subjects should be instructed to swallow whole capsules and not to chew or open them.

[1270] If vomiting occurs during the course of treatment, subjects should not take NIR178 again before the next scheduled dose.

[1271] Subjects should be instructed not to make up missed doses. A missed dose is defined as a case when the full dose is not taken within 4 hours after the approximate time of the usual daily dosing. That day's dose should be omitted and the subject should continue treatment with the next scheduled dose.

[1272] In the case of anti-ENTPD2 mAb1 and NIR178, subjects should be observed for 2 hours after the first two infusions. The same may be applied for the subsequent dosing if medically indicated.

### Relation Between PD-L1 Expression and Anti-Tumor Activity

[1273] Secondary objectives include the assessment of the relationship between PD-L1 expression level in the tumor with Overall Response Rate (ORR) and Progression Free Survival (PFS) as per RECIST 1.1 and iRECIST.

### Relation Between PD-L1 Expression and Overall Response Rate (ORR)

[1274] PD-L1 expression will be summarized by mean of descriptive statistics for responders and non-responders based on ORR.

### Relation Between PD-L1 Expression and Progression Free Survival (PFS)

[1275] A cox proportional hazard model will be used to evaluate the relationship between PD-L1 expression and PFS. In addition, PFS will be summarized for subjects with high/low PD-L1 expression at baseline using the Kaplan-Meier (KM) method. Median PFS, with corresponding 90 CI, and 25^{th} and 75^{th} percentiles (Brookmeyer and Crowley, Biometrics, pp.29-41 (1982); Klein and Moeschberger (1997) Survival analysis: techniques for censored and truncated data. Springer) will be presented. KM estimates for PFS proportions at specific timepoints, along with 90% CI (Greenwood's formula, Kalbfleisch and Prentice (2002) The Statistical Analysis of Failure Time Data. Wiley Series in Probability and Statistics) will also be provided.

### Example 18

### In Vivo Efficacy of Anti-ENTPD2 mAb15 in Combination with Anti-CD73 Ab in the 4T1 Syngeneic Model in BALB/c Mice

[1276] To demonstrate targeted anti-tumor activity of anti-mouse ENTPD2 antibodies, in vivo, a mouse ENTPD2-engineered model was developed: 4T1 clone 45. This model was derived from the 4T1 murine breast cancer model, where mouse ENTPD2 was overexpressed using a retroviral transduction approach. Live cells that displayed expression of mouse ENTPD2 were separated from the rest of the population via fluorescence activated cells sorting and were subjected to clonal selection by limiting dilution. Stable mouse ENTPD2 expression (approximately 479,000 receptors) in the model was confirmed in vitro by flow cytometry with the mouse ENTPD2 selective anti mouse ENTPD2 mAb15 (FIG. 27). 4T1 clone 45 demonstrated comparable growth kinetics to the parental line in vitro and sustained mouse ENTPD2 expression in the syngeneic host.

[1277] Mouse ENTPD2-engineered 4T1 clone 45 model was established in female BALB/c mice by subcutaneous injection of 0.5×10⁶ cells into the right flank of each mouse. Once tumors reached approximately 50-80 mm³, mice were randomized according to tumor volume into treatment groups (n=10 per group). Mice received an i.p. treatment of either Anti-mENTPD2 mAb15 or a non-specific mouse IgG2a isotype control at a final dose of 10 mg/kg on day 0, 2, 5 and 9. Anti-CD73 mAb 350 or a non-specific human IgG4 was dosed i.p. at a final dose of 20 mg/kg on day 0 and 5. All doses were tolerated and no overt clinical symptoms of toxicities or body weight loss were observed in any of the treatment groups (Table 27).

[1278] No significant anti-tumor efficacy was observed after treatment with the combination of anti-CD73 mAb 350 and the mouse IgG2 isotype. However, there was anti-tumor efficacy after treatment with the combination of the anti-ENTPD2 mAb 15 and the human IgG4 isotype with a AT/AC value of 76.61. The combination regiment of anti-ENTPD3 mAb 15 and the anti-CD73 mAb 350 demonstrated a significant anti-tumor effect with a AT/AC value of 44.09 (Table 27 and FIG. 28).

TABLE 27
Anti-ENTPD2 mAb15 efficacy in a mouse ENTPD2 engineered 4T1
clone 45 syngeneic tumor model on Day 12 post treatment.

| | Anti- | Anti- | | Host Response | |
|---|---|---|---|---|---|
| | ENTPD2 | CD73 | Tumor | | Sur- |
| | mAb | mAb 350 | Response | Δ body | vival |
| | Dose, | Dose, | ΔT/ΔC | weight | (alive/ |
| Treatment | schedule | schedule | (%) | (%) | total) |
| Isotype + Isotype | 10 mg/kg | 20 mg/kg | | 4.87 | 8/8 |
| | dosed D 0, | dosed D 0 | | | |
| | D 2, D 5, D 9 | and D 5 | | | |
| Anti-CD73 mAb | 10 mg/kg | 20 mg/kg | 99.38 | 8.24 | 8/8 |
| 350 + Mouse | dosed D 0, | dosed D 0 | | | |
| IgG2 | | | | | |
| Isotype | D 2, D 5, D 9 | and D 5 | | | |
| Human IgG4 | 10 mg/kg | 20 mg/kg | 76.61 | 6.36 | 8/8 |
| Isotype + anti- | dosed D 0, | dosed D 0 | | | |
| ENTPD2 mAb 15 | D 2, D 5, D 9 | and D 5 | | | |
| Anti-CD73 mAb | 10 mg/kg | 20 mg/kg | 44.09** | 5.3 | 8/8 |
| 350 + anti- | dosed D 0, | dosed D 0 | | | |
| ENTPD2 mAb 15 | D 2, D 5, D 9 | and D 5 | | | |

The experiment was evaluated 12 days post treatment, *p < 0.05 **p < 0.005 versus human IgG4 and Mouse IgG2 isotype group (One-Way ANOVA/Tukey's Multiple Comparisons Test). % ΔT/ΔC = 100 ΔT/ΔC where ΔT = mean tumor volume of the drug treated group on D 12 of study − mean tumor volume of the drug treated group on initial day of dosing; ΔC = mean tumor volume of the control group on D 12 of study ± mean tumor volume of the control group on D 0. Δ body weight (%) = (Mean body weight D 12 − mean body weight D 0)*100/Mean body weight D 0 of treatment.

Treatment with a Combination of Anti-ENTPD2 mAb15 and Anti-CD73 mAb 350 Induces Changes in the Immune Infiltrate of the Mouse ENTPD2 Engineered 4T1 Clone 45 Syngeneic Model in BALB/c Mice.

[1279] In order to understand the impact of anti-ENTPD2 mAb15 alone or in combination with anti-CD73 mAb 350 treatments on the tumor microenvironment, mice were euthanized on day 12 and tumors were dissociated in HyClone RPMI1640 media (GE Healthcare, Pittsburg, Pa.) using gentleMacs C-tubes (Miltenyi Biotec, Auburn, Calif.) on the gentleMacs Octo Dissociator (Miltenyi Biotec, Auburn, Calif.). Approximately 2×10⁶ dissociated tumor cells were blocked with rat anti-mouse CD16/CD32 Ab (Biolegend, San Diego, Calif.) to reduce non-specific FcyRIII/II binding and subsequently stained with the cocktails of antibodies from either the myeloid or T cell panel:

Myeloid Panel

| Myeloid Panel | | Clone | Vendor | Cat # |
|---|---|---|---|---|
| UV | | | | |
| DAPI | Zombie UV | | BL | 423108 |
| BUV395 | CD45 | 30F11 | BD | 564279 |
| BUV737 | CD8 | 53-6.7 | BD | 564297 |
| Violet | | | | |
| BV421 | CD 103 | 2E7 | BL | 121422 |
| BV510 | Ly6G | 1A8 | BL | 127633 |
| BV605 | CD 11b | M1/70 | BL | 101257 |
| BV711 | CD 19 | 6D 5 | BL | 115555 |
| BV785 | F4/80 | BM3 | BL | 123141 |
| Blue | | | | |
| FITC | CD 11c | N418 | BL | 117306 |
| PerCP Cy5.5 | CD86 | GL-1 | BL | 105028 |
| Green | | | | |
| PE | CD39 | Duha59 | BL | 143304 |
| PE/DAZZLE-594 | PDL1 | 10F.902 | BL | 124324 |
| Pe Cy7 | CD206 | C06802 | BL | 141720 |
| Red | | | | |
| APC | CD80 | 16-10A | BL | 104714 |
| AF700 | Ly6C | HK1.4 | BL | 128024 |
| APC/Fire 750 | MHCII | M5.114 | BL | 107652 |

T-cell Panel

| | Market | Clone | Vendor | Cat # |
|---|---|---|---|---|
| UV | | | | |
| DAPI | Zombie UV | | BL | 423108 |
| BUV395 | CD45 | 30F11 | BD | 564279 |
| BUV737 | CD8 | 53-6.7 | BD | 564297 |
| Violet | | | | |
| BV421 | CD49b | DX5 | BD | 563063 |
| BV510 | CD4 | GK1.5 | BL | 100449 |
| BV605 | CD44 | IM-7 | BL | 103047 |
| BV785 | CD69 | H1.2F3 | BL | 104543 |
| Blue | | | | |
| BB15 | CD25 | PC61 | BD | 564424 |
| PerCP Cy5.5 | CD62L | MEL-14 | BL | 104432 |
| Green | | | | |
| PE | CD39 | Duha59 | BL | 143804 |
| Pe Cy7 | PD-1 | J43 | eBio | 25-9985-82 |
| Red | | | | |
| AF700 | CD3 | 17A2 | BL | 100216 |
| APC/Fire 750 | MHCII | M5.114 | BL | 107652 |

BD—Becton Dickinson, BL = Biolegend, eB = eBioscience

[1280] We also stained cells with an anti-ENTPD2 antibody whose binding to ENTP2 is not blocked by anti-ENTPD2 mAb15. All incubations and washed were performed in FACS Buffer composed of 1× Hyclone Phosphate Buffered Saline (GE Healthcare, Pittsburg, Pa.), 1% HyClone Fetal Bovine Serum (GE Healthcare, Pittsburg, Pa.), 2 mM EDTA (ThermoFisher, Waltham Mass.).

[1281] Flow cytometry analysis of 4T1 clone 45 tumors, from mice treated with hIgG4 and mIgG2 isotype antibodies, demonstrated that cell surface expression of ENTPD2 is maintained when mice are treated with hIgG4 and mIgG2 isotype antibodies (FIG. 29). However, mice that were treated with anti-ENTPD2 mAb15 and human IgG4 isotype were shown to have a decrease in cell surface ENTPD2 staining (FIG. 29). This is consistent with previous IHC results demonstrating loss of cell surface ENTPD2 expression following treatment with an anti-ENTPD2 Ab.

[1282] Treatment with the combination of anti-CD73 mAb 350 and anti-ENTPD2 mAb15 significantly increased the activation markers (CD80 or CD86) expressed on CD11b+ dendritic cells (defined as CD45+ CD11b+) in the tumor (FIGS. 30A and B).

[1283] A significant increase in CD4+ central memory cells (defined as CD45+MHCII-CD49−CD4+CD62L+CD44+) and activated CD8+ T cells (defined as CD45+MHCII-CD49−CD8+CD25+) was seen after treatment with anti-ENPTD2 mAb15 in combination with hIgG4 isotype or anti-CD73 mAb 350 (FIGS. 30C and D).

Treatment with a Combination of Anti-ENTPD2 mAb15 and Anti-CD73 mAb 350 Induces Changes in Serum Cytokine Levels in the Mouse ENTPD2 Engineered 4T1 Clone 45 Syngeneic Model in BALB/c Mice.

[1284] In order to investigate the immediate impact of ENTPD2 blockade from an immune pathway engagement/biomarker perspective plasma was collected from BALB/c mice 24 hr after treatment with anti mENTPD2 mAb15 alone or in combination with anti-CD73 mAb 350.

[1285] Mouse ENTPD2-engineered 4T1 clone 45 model was established in female BALB/c mice by subcutaneous injection of 0.5×10⁶ cells into the right flank of each mouse. Once tumors reached approximately 100-150 mm³, mice were randomized according to tumor volume into treatment groups (n=8 per group). Mice received an i.p. treatment of either Anti-mENTPD2 mAb 15 or a non-specific mouse IgG2a isotype control at a final dose of 10 mg/kg on day 0, 2, 5 and 9. Anti-CD73 mAb 350 or a non-specific human IgG4 was dosed i.p. at a final dose of 20 mg/kg on day 0 and 5 (Table 28). All doses were tolerated and no overt clinical symptoms of toxicities or body weight loss were observed in any of the treatment groups.

[1286] For the measurement of cytokines and Serum Amyloid P, a marker of inflammation in a mouse, plasma was collected pre-dosing the mice on Day 0 and 24 hours after the first treatments on Day 1.

TABLE 28
Treatment with anti-ENTPD2 mAb15 and anti-CD73 mAb 350
in a mouse ENTPD2 engineered 4T1 clone 45 syngeneic tumor model.

| | Anti-ENTPD2 mAb15 | Anti-CD73 mAb |
|---|---|---|
| Treatment | Dose, schedule | 350 Dose, schedule |
| Untreated | — | — |
| Isotype + Isotype | 10 mg/kg | 20 mg/kg |
| | dosed D 0, D2, D 5, D 9 | dosed D 0 and D 5 |
| Anti-CD73 mAb | 10 mg/kg | 20 mg/kg |
| 350 + Mouse IgG2 | dosed D 0, D2, D 5, D 9 | dosed D 0 and D 5 |
| Isotype | | |
| Human IgG4 | 10 mg/kg | 20 mg/kg |
| Isotype + anti- | dosed D 0, D2, D 5, D 9 | dosed D 0 and D 5 |
| ENTPD2 mAb 15 | | |
| Anti-CD73 mAb | 10 mg/kg | 20 mg/kg |
| 350 + anti- | dosed D 0, D2, D 5, D 9 | dosed D 0 and D 5 |
| ENTPD2 mAb 15 | | |

[1287] Briefly, plasma was isolated via collection of blood into Microvette MV-H-300 Capillary Plasma Lithium Heparin Blood Collection tube (Sai Infusion technologies, Lake Villa, Ill.), that were spun down at 1000-2000 ×g for 10 min. Plasma samples were stored at −80C until use. 10 μL of serum diluted 1:5 was used for cytokine analysis using the MSD Mouse Pro-Inflammatory Panel 1 (MSD, Rockville, Md.) and 5 μL of serum diluted 1:10 MSD Mouse Cytokine Panel 1 (MSD, Rockville, Md.) according to manufacturer's recommendations. To determine the levels of SAP 10 μL of undiluted serum was used for analysis in the SAP Quantikine® ELISA (RnD systems) according to manufacturer's recommendations.

[1288] A significant increase in plasma MCP1, MIP-2 and IP10 (FIGS. 31A-C) and SAP (FIG. 31D) was detected after treatment with Anti-ENTPD2 mAb15 alone or in combination with anti-CD73 mAb 350. This suggests that anti-ENTPD2 mAb15 is able to affect myeloid cells and induce inflammation in the mice.

[1289] Unless defined otherwise, the technical and scientific terms used herein have the same meaning as they usually understood by a specialist familiar with the field to which the disclosure belongs.

[1290] Unless indicated otherwise, all methods, steps, techniques and manipulations that are not specifically described in detail can be performed and have been performed in a manner known per se, as will be clear to the skilled person. Reference is for example again made to the standard handbooks and the general background art mentioned herein and to the further references cited therein. Unless indicated otherwise, each of the references cited herein is incorporated in its entirety by reference.

[1291] Claims to the invention are non-limiting and are provided below.

[1292] Although particular aspects and claims have been disclosed herein in detail, this has been done by way of example for purposes of illustration only, and is not intended to be limiting with respect to the scope of the appended claims, or the scope of subject matter of claims of any corresponding future application. In particular, it is contemplated by the inventors that various substitutions, alterations, and modifications may be made to the disclosure without departing from the spirit and scope of the disclosure as defined by the claims. The choice of nucleic acid starting material, clone of interest, or library type is believed to be a matter of routine for a person of ordinary skill in the art with knowledge of the aspects described herein. Other aspects, advantages, and modifications considered to be within the scope of the following claims. Those skilled in the art will recognize or be able to ascertain, using no more than routine experimentation, many equivalents of the specific aspects of the invention described herein. Such equivalents are intended to be encompassed by the following claims. Redrafting of claim scope in later filed corresponding applications may be due to limitations by the patent laws of various countries and should not be interpreted as giving up subject matter of the claims.

1. A combination comprising
a) an anti-human ENTPD2 antibody or antigen binding fragment thereof, wherein the antibody or antigen binding fragment thereof comprises a heavy chain complementary determining region 1 (HCDR1), a heavy chain complementary determining region 2 (HCDR2), a heavy chain complementary determining region 3 (HCDR3), a light chain complementary determining region 1 (LCDR1), a light chain complementary determining region 2 (LCDR2), and a light chain complementary determining region 3 (LCDR3) of any antibody or antigen binding fragment provided in Table 1 and
b) an anti-human CD73 antibody or antigen binding fragment thereof, wherein the antibody or antigen binding fragment thereof comprises a heavy chain complementary determining region 1 (HCDR1), a heavy chain complementary determining region 2 (HCDR2), a heavy chain complementary determining region 3 (HCDR3), a light chain complementary determining region 1 (LCDR1), a light chain complementary determining region 2 (LCDR2), and a light chain complementary determining region 3 (LCDR3) of any antibody or antigen binding fragment provided in Table 2.

2. The combination of claim 1, wherein the HCDR1, HCDR2, HCDR3, LCDR1, LCDR2, and LCDR3 of the anti-human ENTPD2 antibody or antigen binding fragment are selected from the HCDR1, HCDR2, HCDR3, LCDR1, LCDR2, and LCDR3 sequences provided in Table 1.

3. The combination of claim 1 or claim 2, wherein the anti-human ENTPD2 antibody or antigen binding fragment thereof comprises a heavy chain variable region provided in Table 1.

4. The combination of any one of claims 1-3, wherein the anti-human ENTPD2 antibody or antigen binding fragment thereof comprises a light chain variable region provided in Table 1.

5. The combination of claim 1 or claim 2, wherein the anti-human ENTPD2 antibody or antigen binding fragment thereof is selected from any one of the following:
1) an antibody or antigen binding fragment thereof comprising:
an HCDR1 sequence comprising SEQ ID NO: 1,
an HCDR2 sequence comprising SEQ ID NO: 2,
an HCDR3 sequence comprising SEQ ID NO: 3,
an LCDR1 sequence comprising SEQ ID NO: 14,
an LCDR2 sequence comprising SEQ ID NO: 15, and
an LCDR3 sequence comprising SEQ ID NO: 16;
2) an antibody or antigen binding fragment thereof comprising:
an HCDR1 sequence comprising SEQ ID NO: 4,
an HCDR2 sequence comprising SEQ ID NO: 5,
an HCDR3 sequence comprising SEQ ID NO: 3,
an LCDR1 sequence comprising SEQ ID NO: 17,
an LCDR2 sequence comprising SEQ ID NO: 18, and
an LCDR3 sequence comprising SEQ ID NO: 19;
3) an antibody or antigen binding fragment thereof comprising:
an HCDR1 sequence comprising SEQ ID NO: 7,
an HCDR2 sequence comprising SEQ ID NO: 8,
an HCDR3 sequence comprising SEQ ID NO: 9,
an LCDR1 sequence comprising SEQ ID NO: 20,
an LCDR2 sequence comprising SEQ ID NO: 18, and
an LCDR3 sequence comprising SEQ ID NO: 16;
4) an antibody or antigen binding fragment thereof comprising:
an HCDR1 sequence comprising SEQ ID NO: 37,
an HCDR2 sequence comprising SEQ ID NO: 38,
an HCDR3 sequence comprising SEQ ID NO: 39,
an LCDR1 sequence comprising SEQ ID NO: 50,
an LCDR2 sequence comprising SEQ ID NO: 51, and
an LCDR3 sequence comprising SEQ ID NO: 52;
5) an antibody or antigen binding fragment thereof comprising:
an HCDR1 sequence comprising SEQ ID NO: 40,
an HCDR2 sequence comprising SEQ ID NO: 41,
an HCDR3 sequence comprising SEQ ID NO: 39,
an LCDR1 sequence comprising SEQ ID NO: 53,
an LCDR2 sequence comprising SEQ ID NO: 54, and
an LCDR3 sequence comprising SEQ ID NO: 55;
6) an antibody or antigen binding fragment thereof comprising:
an HCDR1 sequence comprising SEQ ID NO: 43,
an HCDR2 sequence comprising SEQ ID NO: 44,
an HCDR3 sequence comprising SEQ ID NO: 45,
an LCDR1 sequence comprising SEQ ID NO: 56,
an LCDR2 sequence comprising SEQ ID NO: 54, and
an LCDR3 sequence comprising SEQ ID NO: 52;
7) an antibody or antigen binding fragment thereof comprising:
an HCDR1 sequence comprising SEQ ID NO: 37,
an HCDR2 sequence comprising SEQ ID NO: 38,
an HCDR3 sequence comprising SEQ ID NO: 39,
an LCDR1 sequence comprising SEQ ID NO: 61,
an LCDR2 sequence comprising SEQ ID NO: 51, and
an LCDR3 sequence comprising SEQ ID NO: 52;
8) an antibody or antigen binding fragment thereof comprising:
an HCDR1 sequence comprising SEQ ID NO: 40,
an HCDR2 sequence comprising SEQ ID NO: 41,
an HCDR3 sequence comprising SEQ ID NO: 39,
an LCDR1 sequence comprising SEQ ID NO: 62,
an LCDR2 sequence comprising SEQ ID NO: 54, and
an LCDR3 sequence comprising SEQ ID NO: 55;
9) an antibody or antigen binding fragment thereof comprising:
an HCDR1 sequence comprising SEQ ID NO: 43,
an HCDR2 sequence comprising SEQ ID NO: 44,
an HCDR3 sequence comprising SEQ ID NO: 45,
an LCDR1 sequence comprising SEQ ID NO: 63,
an LCDR2 sequence comprising SEQ ID NO: 54, and
an LCDR3 sequence comprising SEQ ID NO: 52;
10) an antibody or antigen binding fragment thereof comprising:
an HCDR1 sequence comprising SEQ ID NO: 37,
an HCDR2 sequence comprising SEQ ID NO: 38,
an HCDR3 sequence comprising SEQ ID NO: 68,
an LCDR1 sequence comprising SEQ ID NO: 50,
an LCDR2 sequence comprising SEQ ID NO: 51, and
an LCDR3 sequence comprising SEQ ID NO: 52;
11) an antibody or antigen binding fragment thereof comprising:
an HCDR1 sequence comprising SEQ ID NO: 40,
an HCDR2 sequence comprising SEQ ID NO: 41,
an HCDR3 sequence comprising SEQ ID NO: 68,
an LCDR1 sequence comprising SEQ ID NO: 53,
an LCDR2 sequence comprising SEQ ID NO: 54, and
an LCDR3 sequence comprising SEQ ID NO: 55;
12) an antibody or antigen binding fragment thereof comprising:
an HCDR1 sequence comprising SEQ ID NO: 43,
an HCDR2 sequence comprising SEQ ID NO: 44,
an HCDR3 sequence comprising SEQ ID NO: 69,
an LCDR1 sequence comprising SEQ ID NO: 56,
an LCDR2 sequence comprising SEQ ID NO: 54, and
an LCDR3 sequence comprising SEQ ID NO: 52;
13) an antibody or antigen binding fragment thereof comprising:
an HCDR1 sequence comprising SEQ ID NO: 82,
an HCDR2 sequence comprising SEQ ID NO: 83,
an HCDR3 sequence comprising SEQ ID NO: 84,
an LCDR1 sequence comprising SEQ ID NO: 95,
an LCDR2 sequence comprising SEQ ID NO: 96, and
an LCDR3 sequence comprising SEQ ID NO: 97;
14) an antibody or antigen binding fragment thereof comprising:
an HCDR1 sequence comprising SEQ ID NO: 85,
an HCDR2 sequence comprising SEQ ID NO: 86,
an HCDR3 sequence comprising SEQ ID NO: 84,
an LCDR1 sequence comprising SEQ ID NO: 98,
an LCDR2 sequence comprising SEQ ID NO: 99, and
an LCDR3 sequence comprising SEQ ID NO: 100;
15) an antibody or antigen binding fragment thereof comprising:
an HCDR1 sequence comprising SEQ ID NO: 88,
an HCDR2 sequence comprising SEQ ID NO: 89,
an HCDR3 sequence comprising SEQ ID NO: 90,
an LCDR1 sequence comprising SEQ ID NO: 101,
an LCDR2 sequence comprising SEQ ID NO: 99, and
an LCDR3 sequence comprising SEQ ID NO: 97;
16) an antibody or antigen binding fragment thereof comprising:
an HCDR1 sequence comprising SEQ ID NO: 106,
an HCDR2 sequence comprising SEQ ID NO: 107,
an HCDR3 sequence comprising SEQ ID NO: 108,
an LCDR1 sequence comprising SEQ ID NO: 119,
an LCDR2 sequence comprising SEQ ID NO: 120, and
an LCDR3 sequence comprising SEQ ID NO: 121;
17) an antibody or antigen binding fragment thereof comprising:
an HCDR1 sequence comprising SEQ ID NO: 109,
an HCDR2 sequence comprising SEQ ID NO: 110,
an HCDR3 sequence comprising SEQ ID NO: 108,
an LCDR1 sequence comprising SEQ ID NO: 122,
an LCDR2 sequence comprising SEQ ID NO: 99, and
an LCDR3 sequence comprising SEQ ID NO: 123;
18) an antibody or antigen binding fragment thereof comprising:
an HCDR1 sequence comprising SEQ ID NO: 112,
an HCDR2 sequence comprising SEQ ID NO: 113,
an HCDR3 sequence comprising SEQ ID NO: 114,
an LCDR1 sequence comprising SEQ ID NO: 124,
an LCDR2 sequence comprising SEQ ID NO: 99, and
an LCDR3 sequence comprising SEQ ID NO: 121;
19) an antibody or antigen binding fragment thereof comprising:
an HCDR1 sequence comprising SEQ ID NO: 106,
an HCDR2 sequence comprising SEQ ID NO: 129,
an HCDR3 sequence comprising SEQ ID NO: 108,
an LCDR1 sequence comprising SEQ ID NO: 119,
an LCDR2 sequence comprising SEQ ID NO: 120, and
an LCDR3 sequence comprising SEQ ID NO: 121;
20) an antibody or antigen binding fragment thereof comprising:
an HCDR1 sequence comprising SEQ ID NO: 109,
an HCDR2 sequence comprising SEQ ID NO: 130,
an HCDR3 sequence comprising SEQ ID NO: 108
an LCDR1 sequence comprising SEQ ID NO: 122,
an LCDR2 sequence comprising SEQ ID NO: 99, and
an LCDR3 sequence comprising SEQ ID NO: 123;
21) an antibody or antigen binding fragment thereof comprising:
an HCDR1 sequence comprising SEQ ID NO: 112,
an HCDR2 sequence comprising SEQ ID NO: 131,
an HCDR3 sequence comprising SEQ ID NO: 114,
an LCDR1 sequence comprising SEQ ID NO: 124,
an LCDR2 sequence comprising SEQ ID NO: 99, and
an LCDR3 sequence comprising SEQ ID NO: 121;
22) an antibody or antigen binding fragment thereof comprising:
an HCDR1 sequence comprising SEQ ID NO: 136,
an HCDR2 sequence comprising SEQ ID NO: 137,
an HCDR3 sequence comprising SEQ ID NO: 138,
an LCDR1 sequence comprising SEQ ID NO: 149,
an LCDR2 sequence comprising SEQ ID NO: 150, and
an LCDR3 sequence comprising SEQ ID NO: 151;
23) an antibody or antigen binding fragment thereof comprising:
an HCDR1 sequence comprising SEQ ID NO: 139,
an HCDR2 sequence comprising SEQ ID NO: 140,
an HCDR3 sequence comprising SEQ ID NO: 138,
an LCDR1 sequence comprising SEQ ID NO: 152,
an LCDR2 sequence comprising SEQ ID NO: 153, and
an LCDR3 sequence comprising SEQ ID NO: 154;
24) an antibody or antigen binding fragment thereof comprising:
an HCDR1 sequence comprising SEQ ID NO: 142,
an HCDR2 sequence comprising SEQ ID NO: 143,
an HCDR3 sequence comprising SEQ ID NO: 144,
an LCDR1 sequence comprising SEQ ID NO: 155,
an LCDR2 sequence comprising SEQ ID NO: 153, and
an LCDR3 sequence comprising SEQ ID NO: 151;
25) an antibody or antigen binding fragment thereof comprising:
an HCDR1 sequence comprising SEQ ID NO: 160,
an HCDR2 sequence comprising SEQ ID NO: 161,
an HCDR3 sequence comprising SEQ ID NO: 162,
an LCDR1 sequence comprising SEQ ID NO: 173,
an LCDR2 sequence comprising SEQ ID NO: 150, and
an LCDR3 sequence comprising SEQ ID NO: 174;
26) an antibody or antigen binding fragment thereof comprising:
an HCDR1 sequence comprising SEQ ID NO: 163,
an HCDR2 sequence comprising SEQ ID NO: 164,
an HCDR3 sequence comprising SEQ ID NO: 162,
an LCDR1 sequence comprising SEQ ID NO: 175,
an LCDR2 sequence comprising SEQ ID NO: 153, and
an LCDR3 sequence comprising SEQ ID NO: 176;
27) an antibody or antigen binding fragment thereof comprising:
an HCDR1 sequence comprising SEQ ID NO: 166,
an HCDR2 sequence comprising SEQ ID NO: 167,
an HCDR3 sequence comprising SEQ ID NO: 168,
an LCDR1 sequence comprising SEQ ID NO: 177,
an LCDR2 sequence comprising SEQ ID NO: 153, and
an LCDR3 sequence comprising SEQ ID NO: 174;
28) an antibody or antigen binding fragment thereof comprising:
an HCDR1 sequence comprising SEQ ID NO: 37,
an HCDR2 sequence comprising SEQ ID NO: 220,
an HCDR3 sequence comprising SEQ ID NO: 221,
an LCDR1 sequence comprising SEQ ID NO: 61,
an LCDR2 sequence comprising SEQ ID NO: 51, and
an LCDR3 sequence comprising SEQ ID NO: 52;
29) an antibody or antigen binding fragment thereof comprising:
an HCDR1 sequence comprising SEQ ID NO: 40,
an HCDR2 sequence comprising SEQ ID NO: 222,
an HCDR3 sequence comprising SEQ ID NO: 221,
an LCDR1 sequence comprising SEQ ID NO: 62,
an LCDR2 sequence comprising SEQ ID NO: 54, and
an LCDR3 sequence comprising SEQ ID NO: 55;
30) an antibody or antigen binding fragment thereof comprising:
an HCDR1 sequence comprising SEQ ID NO: 43,
an HCDR2 sequence comprising SEQ ID NO: 223,
an HCDR3 sequence comprising SEQ ID NO: 224,
an LCDR1 sequence comprising SEQ ID NO: 63,
an LCDR2 sequence comprising SEQ ID NO: 54, and
an LCDR3 sequence comprising SEQ ID NO: 52;
31) an antibody or antigen binding fragment thereof comprising:
an HCDR1 sequence comprising SEQ ID NO: 37,
an HCDR2 sequence comprising SEQ ID NO: 220,
an HCDR3 sequence comprising SEQ ID NO: 68,
an LCDR1 sequence comprising SEQ ID NO: 61,
an LCDR2 sequence comprising SEQ ID NO: 51, and
an LCDR3 sequence comprising SEQ ID NO: 52;
32) an antibody or antigen binding fragment thereof comprising:
an HCDR1 sequence comprising SEQ ID NO: 40,
an HCDR2 sequence comprising SEQ ID NO: 222,
an HCDR3 sequence comprising SEQ ID NO: 68,
an LCDR1 sequence comprising SEQ ID NO: 62,
an LCDR2 sequence comprising SEQ ID NO: 54, and
an LCDR3 sequence comprising SEQ ID NO: 55;
33) an antibody or antigen binding fragment thereof comprising:
an HCDR1 sequence comprising SEQ ID NO: 43,
an HCDR2 sequence comprising SEQ ID NO: 223,
an HCDR3 sequence comprising SEQ ID NO: 69,
an LCDR1 sequence comprising SEQ ID NO: 63,
an LCDR2 sequence comprising SEQ ID NO: 54, and
an LCDR3 sequence comprising SEQ ID NO: 52;
34) an antibody or antigen binding fragment thereof comprising:
an HCDR1 sequence comprising SEQ ID NO: 1,
an HCDR2 sequence comprising SEQ ID NO: 245,
an HCDR3 sequence comprising SEQ ID NO: 246,
an LCDR1 sequence comprising SEQ ID NO: 254,
an LCDR2 sequence comprising SEQ ID NO: 15, and
an LCDR3 sequence comprising SEQ ID NO: 255;
35) an antibody or antigen binding fragment thereof comprising:
an HCDR1 sequence comprising SEQ ID NO: 4,
an HCDR2 sequence comprising SEQ ID NO: 247,
an HCDR3 sequence comprising SEQ ID NO: 246,
an LCDR1 sequence comprising SEQ ID NO: 17,
an LCDR2 sequence comprising SEQ ID NO: 18, and
an LCDR3 sequence comprising SEQ ID NO: 256;
36) an antibody or antigen binding fragment thereof comprising:
an HCDR1 sequence comprising SEQ ID NO: 7,
an HCDR2 sequence comprising SEQ ID NO: 248,
an HCDR3 sequence comprising SEQ ID NO: 249,
an LCDR1 sequence comprising SEQ ID NO: 20,
an LCDR2 sequence comprising SEQ ID NO: 18, and
an LCDR3 sequence comprising SEQ ID NO: 255;
37) an antibody or antigen binding fragment thereof comprising:
an HCDR1 sequence comprising SEQ ID NO: 1,
an HCDR2 sequence comprising SEQ ID NO: 261,
an HCDR3 sequence comprising SEQ ID NO: 262,
an LCDR1 sequence comprising SEQ ID NO: 254,
an LCDR2 sequence comprising SEQ ID NO: 15, and
an LCDR3 sequence comprising SEQ ID NO: 16;
38) an antibody or antigen binding fragment thereof comprising:
an HCDR1 sequence comprising SEQ ID NO: 4,
an HCDR2 sequence comprising SEQ ID NO: 247,
an HCDR3 sequence comprising SEQ ID NO: 262,
an LCDR1 sequence comprising SEQ ID NO: 17,
an LCDR2 sequence comprising SEQ ID NO: 18, and
an LCDR3 sequence comprising SEQ ID NO: 19;
39) an antibody or antigen binding fragment thereof comprising:
an HCDR1 sequence comprising SEQ ID NO: 7,
an HCDR2 sequence comprising SEQ ID NO: 248,
an HCDR3 sequence comprising SEQ ID NO: 263,
an LCDR1 sequence comprising SEQ ID NO: 20,
an LCDR2 sequence comprising SEQ ID NO: 18, and
an LCDR3 sequence comprising SEQ ID NO: 16;
40) an antibody or antigen binding fragment thereof comprising:
an HCDR1 sequence comprising SEQ ID NO: 272,
an HCDR2 sequence comprising SEQ ID NO: 273,
an HCDR3 sequence comprising SEQ ID NO: 274,
an LCDR1 sequence comprising SEQ ID NO: 254,
an LCDR2 sequence comprising SEQ ID NO: 285, and
an LCDR3 sequence comprising SEQ ID NO: 16;
41) an antibody or antigen binding fragment thereof comprising:
an HCDR1 sequence comprising SEQ ID NO: 275,
an HCDR2 sequence comprising SEQ ID NO: 276,
an HCDR3 sequence comprising SEQ ID NO: 274,
an LCDR1 sequence comprising SEQ ID NO: 17,
an LCDR2 sequence comprising SEQ ID NO: 286, and
an LCDR3 sequence comprising SEQ ID NO: 19; or
42) an antibody or antigen binding fragment thereof comprising:
an HCDR1 sequence comprising SEQ ID NO: 278,
an HCDR2 sequence comprising SEQ ID NO: 279,
an HCDR3 sequence comprising SEQ ID NO: 280,
an LCDR1 sequence comprising SEQ ID NO: 20,
an LCDR2 sequence comprising SEQ ID NO: 286, and
an LCDR3 sequence comprising SEQ ID NO: 16.

6. The combination of any one of claims 1-5, wherein the anti-human ENTPD2 antibody or antigen binding fragment thereof is selected from any one of the following:
i) an antibody or antigen binding fragment thereof comprising a heavy chain variable region (VH) comprising SEQ ID NO: 10 or a sequence at least about 95% or more identical thereto, and a light chain variable region (VL) comprising SEQ ID NO: 21 or a sequence at least about 95% or more identical thereto;
ii) an antibody or antigen binding fragment thereof comprising a VH comprising SEQ ID NO: 25 or a sequence at least about 95% or more identical thereto, and a VL comprising SEQ ID NO: 29 or a sequence at least about 95% or more identical thereto;
iii) an antibody or antigen binding fragment thereof comprising a VH comprising SEQ ID NO: 33 or a sequence at least about 95% or more identical thereto, and a VL comprising SEQ ID NO: 29 or a sequence at least about 95% or more identical thereto;
iv)an antibody or antigen binding fragment thereof comprising a VH comprising SEQ ID NO: 46 or a sequence at least about 95% or more identical thereto, and a VL comprising SEQ ID NO: 57 or a sequence at least about 95% or more identical thereto;
v) an antibody or antigen binding fragment thereof comprising a VH comprising SEQ ID NO: 46 or a sequence at least about 95% or more identical thereto, and a VL comprising SEQ ID NO: 64 or a sequence at least about 95% or more identical thereto;
vi)an antibody or antigen binding fragment thereof comprising a VH comprising SEQ ID NO: 70 or a sequence at least about 95% or more identical thereto, and a VL comprising SEQ ID NO: 74 or a sequence at least about 95% or more identical thereto;
vii) an antibody or antigen binding fragment thereof comprising a VH comprising SEQ ID NO: 25 or a sequence at least about 95% or more identical thereto, and a VL comprising SEQ ID NO: 78 or a sequence at least about 95% or more identical thereto;
viii) an antibody or antigen binding fragment thereof comprising a VH comprising SEQ ID NO: 91 or a sequence at least about 95% or more identical thereto, and a VL comprising SEQ ID NO: 102 or a sequence at least about 95% or more identical thereto;
ix)an antibody or antigen binding fragment thereof comprising a VH comprising SEQ ID NO: 115 or a sequence at least about 95% or more identical thereto, and a VL comprising SEQ ID NO: 125 or a sequence at least about 95% or more identical thereto;
x) an antibody or antigen binding fragment thereof comprising a VH comprising SEQ ID NO: 132 or a sequence at least about 95% or more identical thereto, and a VL comprising SEQ ID NO: 125 or a sequence at least about 95% or more identical thereto;
xi)an antibody or antigen binding fragment thereof comprising a VH comprising SEQ ID NO: 145 or a sequence at least about 95% or more identical thereto, and a VL comprising SEQ ID NO: 156 or a sequence at least about 95% or more identical thereto;
xii) an antibody or antigen binding fragment thereof comprising a VH comprising SEQ ID NO: 169 or a sequence at least about 95% or more identical thereto, and a VL comprising SEQ ID NO: 178 or a sequence at least about 95% or more identical thereto;
xiii) an antibody or antigen binding fragment thereof comprising a VH comprising SEQ ID NO: 225 or a sequence at least about 95% or more identical thereto, and a VL comprising SEQ ID NO: 229 or a sequence at least about 95% or more identical thereto;
xiv) an antibody or antigen binding fragment thereof comprising a VH comprising SEQ ID NO: 233 or a sequence at least about 95% or more identical thereto, and a VL comprising SEQ ID NO: 237 or a sequence at least about 95% or more identical thereto;
xv) an antibody or antigen binding fragment thereof comprising a VH comprising SEQ ID NO: 241 or a sequence at least about 95% or more identical thereto, and a VL comprising SEQ ID NO: 229 or a sequence at least about 95% or more identical thereto;
xvi) an antibody or antigen binding fragment thereof comprising a VH comprising SEQ ID NO: 250 or a sequence at least about 95% or more identical thereto, and a VL comprising SEQ ID NO: 257 or a sequence at least about 95% or more identical thereto;
xvii) an antibody or antigen binding fragment thereof comprising a VH comprising SEQ ID NO: 264 or a sequence at least about 95% or more identical thereto, and a VL comprising SEQ ID NO: 268 or a sequence at least about 95% or more identical thereto; or
xviii) an antibody or antigen binding fragment thereof comprising a VH comprising SEQ ID NO: 281 or a sequence at least about 95% or more identical thereto, and a VL comprising SEQ ID NO: 287 or a sequence at least about 95% or more identical thereto.

7. The combination of any one of claims 1-6, wherein the anti-human ENTPD2 antibody or antigen binding fragment thereof is selected from any one of the following:
1) an antibody comprising a heavy chain comprising SEQ ID NO: 12 or a sequence at least about 95% or more identical thereto, and a light chain comprising SEQ ID NO: 23 or a sequence at least about 95% or more identical thereto;
2) an antibody comprising a heavy chain comprising SEQ ID NO: 27 or a sequence at least about 95% or more identical thereto, and a light chain comprising SEQ ID NO: 31 or a sequence at least about 95% or more identical thereto;
3) an antibody comprising a heavy chain comprising SEQ ID NO: 35 or a sequence at least about 95% or more identical thereto, and a light chain comprising SEQ ID NO: 31 or a sequence at least about 95% or more identical thereto;
4) an antibody comprising a heavy chain comprising SEQ ID NO: 48 or a sequence at least about 95% or more identical thereto, and a light chain comprising SEQ ID NO: 59 or a sequence at least about 95% or more identical thereto;
5) an antibody comprising a heavy chain comprising SEQ ID NO: 48 or a sequence at least about 95% or more identical thereto, and a light chain comprising SEQ ID NO: 66 or a sequence at least about 95% or more identical thereto;
6) an antibody comprising a heavy chain comprising SEQ ID NO: 72 or a sequence at least about 95% or more identical thereto, and a light chain comprising SEQ ID NO: 76 or a sequence at least about 95% or more identical thereto;
7) an antibody comprising a heavy chain comprising SEQ ID NO: 27 or a sequence at least about 95% or more identical thereto, and a light chain comprising SEQ ID NO: 80 or a sequence at least about 95% or more identical thereto;
8) an antibody comprising a heavy chain comprising SEQ ID NO: 93 or a sequence at least about 95% or more identical thereto, and a light chain comprising SEQ ID NO: 104 or a sequence at least about 95% or more identical thereto;
9) an antibody comprising a heavy chain comprising SEQ ID NO: 117 or a sequence at least about 95% or more identical thereto, and a light chain comprising SEQ ID NO: 127 or a sequence at least about 95% or more identical thereto;
10) an antibody comprising a heavy chain comprising SEQ ID NO: 134 or a sequence at least about 95% or more identical thereto, and a light chain comprising SEQ ID NO: 127 or a sequence at least about 95% or more identical thereto;
11) an antibody comprising a heavy chain comprising SEQ ID NO: 147 or a sequence at least about 95% or more identical thereto, and a light chain comprising SEQ ID NO: 158 or a sequence at least about 95% or more identical thereto;
12) an antibody comprising a heavy chain comprising SEQ ID NO: 171 or a sequence at least about 95% or more identical thereto, and a light chain comprising SEQ ID NO: 180 or a sequence at least about 95% or more identical thereto;
13) an antibody comprising a heavy chain comprising SEQ ID NO: 227 or a sequence at least about 95% or more identical thereto, and a light chain comprising SEQ ID NO: 231 or a sequence at least about 95% or more identical thereto;
14) an antibody comprising a heavy chain comprising SEQ ID NO: 235 or a sequence at least about 95% or more identical thereto, and a light chain comprising SEQ ID NO: 239 or a sequence at least about 95% or more identical thereto;
15) an antibody comprising a heavy chain comprising SEQ ID NO: 243 or a sequence at least about 95% or more identical thereto, and a light chain comprising SEQ ID NO: 231 or a sequence at least about 95% or more identical thereto;
16) an antibody comprising a heavy chain comprising SEQ ID NO: 252 or a sequence at least about 95% or more identical thereto, and a light chain comprising SEQ ID NO: 259 or a sequence at least about 95% or more identical thereto;
17) an antibody comprising a heavy chain comprising SEQ ID NO: 266 or a sequence at least about 95% or more identical thereto, and a light chain comprising SEQ ID NO: 270 or a sequence at least about 95% or more identical thereto; or
18) an antibody comprising a heavy chain comprising SEQ ID NO: 283 or a sequence at least about 95% or more identical thereto, and a light chain comprising SEQ ID NO: 289 or a sequence at least about 95% or more identical thereto.

8. The combination of any one of claims 1-7, wherein the anti-human ENTPD2 antibody or antigen binding fragment thereof comprises:
an HCDR1 sequence comprising SEQ ID NO: 1,
an HCDR2 sequence comprising SEQ ID NO: 2,
an HCDR3 sequence comprising SEQ ID NO: 3,
an LCDR1 sequence comprising SEQ ID NO: 14,
an LCDR2 sequence comprising SEQ ID NO: 15, and
an LCDR3 sequence comprising SEQ ID NO: 16.

9. The combination of any one of claims 1-7, wherein the anti-human ENTPD2 antibody or antigen binding fragment thereof comprises:
an HCDR1 sequence comprising SEQ ID NO: 4,
an HCDR2 sequence comprising SEQ ID NO: 5,
an HCDR3 sequence comprising SEQ ID NO: 3,
an LCDR1 sequence comprising SEQ ID NO: 17,
an LCDR2 sequence comprising SEQ ID NO: 18, and
an LCDR3 sequence comprising SEQ ID NO: 19.

10. The combination of any one of claims 1-7, wherein the anti-human ENTPD2 antibody or antigen binding fragment thereof comprises:
an HCDR1 sequence comprising SEQ ID NO: 7,
an HCDR2 sequence comprising SEQ ID NO: 8,
an HCDR3 sequence comprising SEQ ID NO: 9,
an LCDR1 sequence comprising SEQ ID NO: 20,
an LCDR2 sequence comprising SEQ ID NO: 18, and
an LCDR3 sequence comprising SEQ ID NO: 16.

11. The combination of any one of claims 1-7, wherein the anti-human ENTPD2 antibody or antigen binding fragment thereof comprises a heavy chain variable region (VH) comprising SEQ ID NO: 10 or a sequence at least about 95% or more identical thereto, and a light chain variable region (VL) comprising SEQ ID NO: 21 or a sequence at least about 95% or more identical thereto.

12. The combination of any one of claims 1-7, wherein the anti-human ENTPD2 antibody or antigen binding fragment thereof comprises SEQ ID NO: 12 or a sequence at least about 95% or more identical thereto, and a light chain comprising SEQ ID NO: 23 or a sequence at least about 95% or more identical thereto.

13. The combination of any one of claims 1-12, wherein the anti-human ENTPD2 antibody or antigen binding fragment thereof binds to an epitope in human ENTPD2, wherein the epitope comprises at least one of the following residues: His50, Asp76, Pro78, Gly79, Gly80, Tyr85, Asp87, Asn88, Gly91, Gln94, Ser95, Gly98, Glu101, Gln102, Gln105, Asp106, Arg245, Thr272, Gln273, Leu275, Asp278, Arg298, Ala347, Ala350, Thr351, Arg392, Ala393, Arg394, or Tyr398.

14. The combination of any one of claims 1-12, wherein the anti-human ENTPD2 antibody or antigen binding fragment thereof binds to an epitope in human ENTPD2, wherein the epitope comprises at least one of the following residues: Gly79, Gln250, Leu253, Trp266, Arg268, Gly269, Phe270, Ser271, Thr272, Gln273, Val274, Leu275, Asp278, Arg298, Ser300, Ser302, Gly303, Thr380, Trp381, Ala382, Gly390, Gln391, Arg392, Ala393, Arg394, or Asp397.

15. The combination of any one of claims 1-14, wherein the HCDR1, HCDR2, HCDR3, LCDR1, LCDR2, and LCDR3 of the anti-human CD73 antibody or antigen binding fragment are selected from the HCDR1, HCDR2, HCDR3, LCDR1, LCDR2, and LCDR3 sequences provided in Table 2.

16. The combination of any one of claims 1-15, wherein the anti-human CD73 antibody or antigen binding fragment thereof comprises a heavy chain variable region provided in Table 2.

17. The combination of any one of claims 1 to 16, wherein the anti-human CD73 antibody or antigen binding fragment thereof comprises a light chain variable region provided in Table 2.

18. The combination of any one of claims 1-15, wherein the anti-human CD73 antibody or antigen binding fragment thereof is selected from any one of the following:
i) an antibody or antigen binding fragment thereof comprising:
an HCDR1 sequence comprising SEQ ID NO: 363,
an HCDR2 sequence comprising SEQ ID NO:361,
an HCDR3 sequence comprising SEQ ID NO: 362,
an LCDR1 sequence comprising SEQ ID NO: 373,
an LCDR2 sequence comprising SEQ ID NO: 374, and
an LCDR3 sequence comprising SEQ ID NO: 375;
ii) an antibody or antigen binding fragment thereof comprising:
an HCDR1 sequence comprising SEQ ID NO: 363,
an HCDR2 sequence comprising SEQ ID NO: 385,
an HCDR3 sequence comprising SEQ ID NO: 362,
an LCDR1 sequence comprising SEQ ID NO: 373,
an LCDR2 sequence comprising SEQ ID NO: 374, and
an LCDR3 sequence comprising SEQ ID NO: 375;
iii) an antibody or antigen binding fragment thereof comprising:
an HCDR1 sequence comprising SEQ ID NO: 397,
an HCDR2 sequence comprising SEQ ID NO: 395,
an HCDR3 sequence comprising SEQ ID NO: 396,
an LCDR1 sequence comprising SEQ ID NO: 407,
an LCDR2 sequence comprising SEQ ID NO: 408, and
an LCDR3 sequence comprising SEQ ID NO: 409;
iv) an antibody or antigen binding fragment thereof comprising:
an HCDR1 sequence comprising SEQ ID NO: 420,
an HCDR2 sequence comprising SEQ ID NO: 419,
an HCDR3 sequence comprising SEQ ID NO: 362,
an LCDR1 sequence comprising SEQ ID NO: 373,
an LCDR2 sequence comprising SEQ ID NO: 374, and
an LCDR3 sequence comprising SEQ ID NO: 375;
v) an antibody or antigen binding fragment thereof comprising:
an HCDR1 sequence comprising SEQ ID NO: 431,
an HCDR2 sequence comprising SEQ ID NO: 430,
an HCDR3 sequence comprising SEQ ID NO: 396,
an LCDR1 sequence comprising SEQ ID NO: 407,
an LCDR2 sequence comprising SEQ ID NO: 408, and
an LCDR3 sequence comprising SEQ ID NO: 409;
vi) an antibody or antigen binding fragment thereof comprising:
an HCDR1 sequence comprising SEQ ID NO: 397,
an HCDR2 sequence comprising SEQ ID NO: 430,
an HCDR3 sequence comprising SEQ ID NO: 396,
an LCDR1 sequence comprising SEQ ID NO: 407,
an LCDR2 sequence comprising SEQ ID NO: 408, and
an LCDR3 sequence comprising SEQ ID NO: 409;
vii) an antibody or antigen binding fragment thereof comprising:
an HCDR1 sequence comprising SEQ ID NO: 494,
an HCDR2 sequence comprising SEQ ID NO: 493,
an HCDR3 sequence comprising SEQ ID NO: 396,
an LCDR1 sequence comprising SEQ ID NO: 407,
an LCDR2 sequence comprising SEQ ID NO: 408, and
an LCDR3 sequence comprising SEQ ID NO: 409;
viii) an antibody or antigen binding fragment thereof comprising:
an HCDR1 sequence comprising SEQ ID NO: 494,
an HCDR2 sequence comprising SEQ ID NO: 503,
an HCDR3 sequence comprising SEQ ID NO: 396,
an LCDR1 sequence comprising SEQ ID NO: 407,
an LCDR2 sequence comprising SEQ ID NO: 408, and
an LCDR3 sequence comprising SEQ ID NO: 409;
ix) an antibody or antigen binding fragment thereof comprising:
an HCDR1 sequence comprising SEQ ID NO: 494,
an HCDR2 sequence comprising SEQ ID NO: 511,
an HCDR3 sequence comprising SEQ ID NO: 396,
an LCDR1 sequence comprising SEQ ID NO: 407,
an LCDR2 sequence comprising SEQ ID NO: 408, and
an LCDR3 sequence comprising SEQ ID NO: 409;
x) an antibody or antigen binding fragment thereof comprising:
an HCDR1 sequence comprising SEQ ID NO: 520,
an HCDR2 sequence comprising SEQ ID NO: 519,
an HCDR3 sequence comprising SEQ ID NO: 362,
an LCDR1 sequence comprising SEQ ID NO: 373,
an LCDR2 sequence comprising SEQ ID NO: 374, and
an LCDR3 sequence comprising SEQ ID NO: 375;
xi) an antibody or antigen binding fragment thereof comprising:
an HCDR1 sequence comprising SEQ ID NO: 397,
an HCDR2 sequence comprising SEQ ID NO: 541,
an HCDR3 sequence comprising SEQ ID NO: 396,
an LCDR1 sequence comprising SEQ ID NO: 545,
an LCDR2 sequence comprising SEQ ID NO: 546, and
an LCDR3 sequence comprising SEQ ID NO: 547;
xii) an antibody or antigen binding fragment thereof comprising:
an HCDR1 sequence comprising SEQ ID NO: 397,
an HCDR2 sequence comprising SEQ ID NO: 554,
an HCDR3 sequence comprising SEQ ID NO: 396,
an LCDR1 sequence comprising SEQ ID NO: 545,
an LCDR2 sequence comprising SEQ ID NO: 546, and
an LCDR3 sequence comprising SEQ ID NO: 547;
xiii) an antibody or antigen binding fragment thereof comprising:
an HCDR1 sequence comprising SEQ ID NO: 561,
an HCDR2 sequence comprising SEQ ID NO: 559,
an HCDR3 sequence comprising SEQ ID NO: 560,
an LCDR1 sequence comprising SEQ ID NO: 569,
an LCDR2 sequence comprising SEQ ID NO: 374, and
an LCDR3 sequence comprising SEQ ID NO: 570;
xiv) an antibody or antigen binding fragment thereof comprising:
an HCDR1 sequence comprising SEQ ID NO: 578,
an HCDR2 sequence comprising SEQ ID NO: 576,
an HCDR3 sequence comprising SEQ ID NO: 577,
an LCDR1 sequence comprising SEQ ID NO: 585,
an LCDR2 sequence comprising SEQ ID NO: 586, and
an LCDR3 sequence comprising SEQ ID NO: 587;
xv) an antibody or antigen binding fragment thereof comprising:
an HCDR1 sequence comprising SEQ ID NO: 596,
an HCDR2 sequence comprising SEQ ID NO: 594,
an HCDR3 sequence comprising SEQ ID NO: 595,
an LCDR1 sequence comprising SEQ ID NO: 604,
an LCDR2 sequence comprising SEQ ID NO: 408, and
an LCDR3 sequence comprising SEQ ID NO: 605;
xvi) an antibody or antigen binding fragment thereof comprising:
an HCDR1 sequence comprising SEQ ID NO: 420,
an HCDR2 sequence comprising SEQ ID NO: 611,
an HCDR3 sequence comprising SEQ ID NO: 612,
an LCDR1 sequence comprising SEQ ID NO: 373,
an LCDR2 sequence comprising SEQ ID NO: 374, and
an LCDR3 sequence comprising SEQ ID NO: 620;
xvii) an antibody or antigen binding fragment thereof comprising:
an HCDR1 sequence comprising SEQ ID NO: 626,
an HCDR2 sequence comprising SEQ ID NO: 624,
an HCDR3 sequence comprising SEQ ID NO: 625,
an LCDR1 sequence comprising SEQ ID NO: 373,
an LCDR2 sequence comprising SEQ ID NO: 374, and
an LCDR3 sequence comprising SEQ ID NO: 634;

19. The combination of any one of claims 1-18, wherein the anti-human CD73 antibody or antigen binding fragment thereof comprises:
an HCDR1 sequence comprising SEQ ID NO: 397,
an HCDR2 sequence comprising SEQ ID NO: 395,
an HCDR3 sequence comprising SEQ ID NO: 396,
an LCDR1 sequence comprising SEQ ID NO: 407,
an LCDR2 sequence comprising SEQ ID NO: 408, and
an LCDR3 sequence comprising SEQ ID NO: 409.

20. The combination of any one of claims 1-19, wherein the anti-human CD73 antibody or antigen binding fragment thereof is selected from any one of the following:
i) an antibody or antigen binding fragment thereof comprising a heavy chain variable region (VH) comprising SEQ ID NO: 369 or a sequence at least about 95% or more identical thereto, and a light chain variable region (VL) comprising SEQ ID NO: 380 or a sequence at least about 95% or more identical thereto;
ii) an antibody or antigen binding fragment thereof comprising a VH comprising SEQ ID NO: 390 or a sequence at least about 95% or more identical thereto, and a VL comprising SEQ ID NO: 380 or a sequence at least about 95% or more identical thereto;
iii) an antibody or antigen binding fragment thereof comprising a VH comprising SEQ ID NO: 403 or a sequence at least about 95% or more identical thereto, and a VL comprising SEQ ID NO: 414 or a sequence at least about 95% or more identical thereto;
iv) an antibody or antigen binding fragment thereof comprising a VH comprising SEQ ID NO: 425 or a sequence at least about 95% or more identical thereto, and a VL comprising SEQ ID NO: 380 or a sequence at least about 95% or more identical thereto;
v) an antibody or antigen binding fragment thereof comprising a VH comprising SEQ ID NO: 436 or a sequence at least about 95% or more identical thereto, and a VL comprising SEQ ID NO: 414 or a sequence at least about 95% or more identical thereto;
vi) an antibody or antigen binding fragment thereof comprising a VH comprising SEQ ID NO: 443 or a sequence at least about 95% or more identical thereto, and a VL comprising SEQ ID NO: 414 or a sequence at least about 95% or more identical thereto;
vii) an antibody or antigen binding fragment thereof comprising a VH comprising SEQ ID NO: 499 or a sequence at least about 95% or more identical thereto, and a VL comprising SEQ ID NO: 414 or a sequence at least about 95% or more identical thereto;
viii) an antibody or antigen binding fragment thereof comprising a VH comprising SEQ ID NO: 508 or a sequence at least about 95% or more identical thereto, and a VL comprising SEQ ID NO: 414 or a sequence at least about 95% or more identical thereto;
ix) an antibody or antigen binding fragment thereof comprising a VH comprising SEQ ID NO: 516 or a sequence at least about 95% or more identical thereto, and a VL comprising SEQ ID NO: 414 or a sequence at least about 95% or more identical thereto;
x) an antibody or antigen binding fragment thereof comprising a VH comprising SEQ ID NO: 525 or a sequence at least about 95% or more identical thereto, and a VL comprising SEQ ID NO: 380 or a sequence at least about 95% or more identical thereto;
xi) an antibody or antigen binding fragment thereof comprising a VH comprising SEQ ID NO: 544 or a sequence at least about 95% or more identical thereto, and a VL comprising SEQ ID NO: 553 or a sequence at least about 95% or more identical thereto;
xii) an antibody or antigen binding fragment thereof comprising a VH comprising SEQ ID NO: 557 or a sequence at least about 95% or more identical thereto, and a VL comprising SEQ ID NO: 553 or a sequence at least about 95% or more identical thereto;
xiii) an antibody or antigen binding fragment thereof comprising a VH comprising SEQ ID NO: 568 or a sequence at least about 95% or more identical thereto, and a VL comprising SEQ ID NO: 574 or a sequence at least about 95% or more identical thereto;
xiv) an antibody or antigen binding fragment thereof comprising a VH comprising SEQ ID NO: 584 or a sequence at least about 95% or more identical thereto, and a VL comprising SEQ ID NO: 592 or a sequence at least about 95% or more identical thereto;
xv) an antibody or antigen binding fragment thereof comprising a VH comprising SEQ ID NO: 603 or a sequence at least about 95% or more identical thereto, and a VL comprising SEQ ID NO: 609 or a sequence at least about 95% or more identical thereto;
xvi) an antibody or antigen binding fragment thereof comprising a VH comprising SEQ ID NO: 619 or a sequence at least about 95% or more identical thereto, and a VL comprising SEQ ID NO: 622 or a sequence at least about 95% or more identical thereto; or
xvii) an antibody or antigen binding fragment thereof comprising a VH comprising SEQ ID NO: 633 or a sequence at least about 95% or more identical thereto, and a VL comprising SEQ ID NO: 636 or a sequence at least about 95% or more identical thereto.

21. The combination of any one of claims 1-20, wherein the anti-human CD73 antibody or antigen binding fragment thereof comprises a VH comprising SEQ ID NO: 403 or a sequence at least about 95% or more identical thereto, and a VL comprising SEQ ID NO: 414 or a sequence at least about 95% or more identical thereto.

22. The combination of any one of claims 1-19, wherein the anti-human CD73 antibody or antigen binding fragment thereof is selected from any one of the following:
i) an antibody comprising a heavy chain comprising SEQ ID NO: 371 or a sequence at least about 95% or more identical thereto, and a light chain comprising SEQ ID NO: 382 or a sequence at least about 95% or more identical thereto;
ii) an antibody comprising a heavy chain comprising SEQ ID NO: 392 or a sequence at least about 95% or more identical thereto, and a light chain comprising SEQ ID NO: 382 or a sequence at least about 95% or more identical thereto;
iii) an antibody comprising a heavy chain comprising SEQ ID NO: 405 or a sequence at least about 95% or more identical thereto, and a light chain comprising SEQ ID NO: 416 or a sequence at least about 95% or more identical thereto;
iv) an antibody comprising a heavy chain comprising SEQ ID NO: 427 or a sequence at least about 95% or more identical thereto, and a light chain comprising SEQ ID NO: 382 or a sequence at least about 95% or more identical thereto;
v) an antibody comprising a heavy chain comprising SEQ ID NO: 438 or a sequence at least about 95% or more identical thereto, and a light chain comprising SEQ ID NO: 416 or a sequence at least about 95% or more identical thereto; or
vi) an antibody comprising a heavy chain comprising SEQ ID NO: 445 or a sequence at least about 95% or more identical thereto, and a light chain comprising SEQ ID NO: 416 or a sequence at least about 95% or more identical thereto.

23. The combination of any one of claims 1-22, wherein the anti-human CD73 antibody or antigen binding fragment thereof comprises a heavy chain comprising SEQ ID NO:
405 or a sequence at least about 95% or more identical thereto, and a light chain comprising SEQ ID NO: 416 or a sequence at least about 95% or more identical thereto.

24. The combination of any one of claims 1-23, wherein the anti-human ENTPD2 antibody or antigen binding fragment thereof comprises:
an HCDR1 sequence comprising SEQ ID NO: 1,
an HCDR2 sequence comprising SEQ ID NO: 2,
an HCDR3 sequence comprising SEQ ID NO: 3,
an LCDR1 sequence comprising SEQ ID NO: 14,
an LCDR2 sequence comprising SEQ ID NO: 15, and
an LCDR3 sequence comprising SEQ ID NO: 16
and wherein the anti-human CD73 antibody or antigen binding fragment thereof comprises:
an HCDR1 sequence comprising SEQ ID NO: 397,
an HCDR2 sequence comprising SEQ ID NO: 395,
an HCDR3 sequence comprising SEQ ID NO: 396,
an LCDR1 sequence comprising SEQ ID NO: 407,
an LCDR2 sequence comprising SEQ ID NO: 408, and
an LCDR3 sequence comprising SEQ ID NO: 409.

25. The combination of any one of claims 1-24, wherein the anti-human ENTPD2 antibody or antigen binding fragment thereof comprises a heavy chain variable region (VH) comprising SEQ ID NO: 10 or a sequence at least about 95% or more identical thereto, and a light chain variable region (VL) comprising SEQ ID NO: 21 or a sequence at least about 95% or more identical thereto and wherein the anti-human CD73 antibody or antigen binding fragment thereof comprises a VH comprising SEQ ID NO: 403 or a sequence at least about 95% or more identical thereto, and a VL comprising SEQ ID NO: 414 or a sequence at least about 95% or more identical thereto.

26. The combination of any one of claims 1-25, wherein the anti-human ENTPD2 antibody or antigen binding fragment thereof comprises SEQ ID NO: 12 or a sequence at least about 95% or more identical thereto, and a light chain comprising SEQ ID NO: 23 or a sequence at least about 95% or more identical thereto and wherein the anti-human CD73 antibody or antigen binding fragment thereof comprises a heavy chain comprising SEQ ID NO: 405 or a sequence at least about 95% or more identical thereto, and a light chain comprising SEQ ID NO: 416 or a sequence at least about 95% or more identical thereto.

27. The combination of any one of claims 1-26, wherein the anti-human ENTPD2 antibody or antigen binding fragment thereof comprises anti-ENTPD2 mAb1 and wherein the anti-human CD73 antibody or antigen binding fragment thereof comprises anti-CD73 mAb 373.

28. A pharmaceutical composition comprising the combination of any of the preceeding claims, and a pharmaceutically acceptable carrier.

29. The combination of any of claims 1-27, or the pharmaceutical composition of claim 28, for use as a medicament.

30. The combination of any one of claims 1-27, or the pharmaceutical composition of claim 28, for use in the treatment of a cancer.

31. Use of the combination of any one of claims 1-27, or the pharmaceutical composition of claim 28, in the manufacture of a medicament for treatment of a cancer.

32. The combination or pharmaceutical composition for use according to claim 30, or the use according to claim 31, wherein the cancer is an ENTPD2+ cancer.

33. The combination or pharmaceutical composition for use according to claim 30 or 32, or the use according to claim 31 or 32, wherein the cancer is solid tumor, such as an advanced solid tumor.

34. The combination or pharmaceutical composition for use according to claim 30 or 32-33, or the use according to any one of claims 31-33, wherein the cancer is MSS colorectal cancer (CRC), cholangiocarcinoma (intrahepatic or extrahepatic), pancreatic cancer, esophageal cancer, esophageal gastric junction (EGJ) cancer, or gastric cancer.

35. The combination or pharmaceutical composition for use according to any one of claims 29-30 or 32-34, or the use according to any one of claims 31-34, wherein the combination, or the pharmaceutical composition, is administered to the subject through an intravenous, intratumoral or subcutaneous route.

36. The combination or pharmaceutical composition for use according to any one of claim 29-30 or 32-35, or the use according to any one of claims 31-35, wherein the combination, or the pharmaceutical composition, is administered in combination with at least one additional therapeutic agent or procedure.

37. The combination or pharmaceutical composition for use according to claim 36, or the use according to claim 36, wherein the at least one additional therapeutic agent is a PD-1 inhibitor, e.g., an anti-PD-1 antibody.

38. The combination or pharmaceutical composition for use according to claim 37, or the use according to claim 37; wherein the PD-1 inhibitor is selected from Spartalizumab, Nivolumab, Pembrolizumab, Pidilizumab, MEDI0680, REGN2810, TSR-042, PF-06801591, or AMP-224.

39. The combination or pharmaceutical composition for use according to claim 38, or the use according to claim 38 wherein the PD-1 inhibitor is Spartalizumab.

40. The combination or pharmaceutical composition for use according to any one of claims 35-39, or the use according to any one of claims 35-39, wherein the at least one additional therapeutic agent is a A2aR antagonist, which is selected from the group consisting of NIR178, CPI444N81444, AZD4635/HTL-1071, Vipadenant, GBV-2034, AB928, Theophylline, Istradefylline, Tozadenant/SYN-115, KW-6356, ST-4206, and Preladenant/SCH 420814.

41. The combination or pharmaceutical composition for use according to any one of claims 40, or the use according to any one of claims 40, wherein the at least one additional therapeutic agent is a A2aR antagonist which is NIR178.

42. The combination or pharmaceutical composition for use according to claim 35-41, or the use according to any one of claims 35-41, wherein the additional therapeutic agent is a PD-L1 inhibitor, e.g., an anti-PD-L1 antibody.

43. The combination or pharmaceutical composition for use according to claim 35-42, or the use according to any one of claims 35-42, wherein the at least one additional therapeutic agent is a TGF beta inhibitor, e.g., an anti-TGF beta antibody.

44. A method of treating cancer in a subject in need thereof, the method comprising administering to the subject a therapeutically effective amount of the combination of any one of claims 1-27, or the pharmaceutical composition of claim 28.

45. The method of claim 44, wherein the cancer is an ENTPD2+ cancer.

46. The method of claim 44 or 45, wherein the cancer is a solid tumor, such as an advanced solid tumor.

47. The method of any one of claims 44-46, wherein the cancer is MSS colorectal cancer (CRC), cholangiocarcinoma (intrahepatic or extrahepatic), pancreatic cancer, esophageal cancer, esophageal gastric junction (EGJ) cancer, or gastric cancer.

48. The method of any one of claims 44-47, wherein the combination, or the pharmaceutical composition, is administered to the subject through an intravenous, intratumoral or subcutaneous route.

49. A method of stimulating an immune response in a subject, the method comprising administering to the subject the combination of any one of claims 1-27, or the pharmaceutical composition of claim 28, in an amount effective to stimulate the immune response.

50. The method of any one of claims 44-49, further comprising administering to the subject at least one additional therapeutic agent or procedure.

51. The method of claim 50, wherein the at least one additional therapeutic agent is a PD-1 inhibitor, e.g., a PD-1 antibody.

52. The method of claim51, wherein the PD-1 inhibitor is selected from Spartalizumab, Nivolumab, Pembrolizumab, Pidilizumab, MEDI0680, REGN2810, TSR-042, PF-06801591, or AMP-224.

53. The method of claim 52, wherein the PD-1 inhibitor is Spartalizumab.

54. The method of any one of claims 50 to 52, wherein the at least one additional therapeutic agent is an A2AR antagonist, wherein the A2AR antagonist is selected from the group consisting of NIR178, CPI444N81444, AZD4635/HTL-1071, Vipadenant, GBV-2034, AB928, Theophylline, Istradefylline, Tozadenant/SYN-115, KW-6356, ST-4206, and Preladenant/SCH 420814.

55. The method of claim 54, wherein the at least one additional therapeutic agent is an A2AR antagonist, which is NIR178.

56. The method of any one of claims 50-55, wherein the additional therapeutic agent is a PD-L1 inhibitor, e.g., an anti-PD-L1 antibody.

57. The method of any one of claims 50-56, wherein the at least one additional therapeutic agent is a TGF beta inhibitor, e.g., an anti-TGF beta antibody.

58. The combination or pharmaceutical composition for use according to any one of claim 29-30 or 32-43 or the use of any one of claims 31-43 or the method of any one of claims 44-57, wherein the anti-human ENTPD2 antibody or antigen binding fragment thereof and/or the anti-human CD73 antibody or antigen binding fragment thereof is administered to the subject intravenously as a 1 hr infusion (up to 2 hours if clinically indicated).

59. The combination or pharmaceutical composition for use according to any one of claim 29-30 or 32-43 or 58 or the use of any one of claim 31-43 or 58 or the method of any one of claims 44-58, anti-human ENTPD2 antibody or antigen binding fragment thereof and/or the anti-human CD73 antibody or antigen binding fragment thereof is administered to the subject at 10 mg, 30 mg, 100 mg, 150 mg, 300 mg, 400mg, 600 mg, 800mg, 1200 mg, or 2400 mg once every two or four weeks.

60. The combination or pharmaceutical composition for use according to any one of claim 29-30 or 32-43 or 58-59 or the use of any one of claims 31-43 or 58-59 or the method of any one of claims 44-59, wherein at least one additional therapeutic agent is administered which is Spartalizumab and wherein Spartalizumab is administered to the subject at 400 mg once every four weeks.

61. The combination or pharmaceutical composition for use according to any one of claim 29-30 or 32-43 or 58-60 or the use of any one of claims 31-43 or 58-60 or the method of any one of claims 44-60, wherein at least one additional therapeutic agent is administered which is NIR178, and wherein NIR178 is administered to the subject at 80 mg or 160 mg twice daily (BID) continuously.

The application's sequence listing, which the Patent Office published only in electronic form, follows.

SEQUENCE LISTING (692 sequences)

SEQ ID NO: 1 - protein, 5 aa, Artificial Sequence
  source: /note="Description of Artificial Sequence: Synthetic peptide"
DYNMD

SEQ ID NO: 2 - protein, 17 aa, Artificial Sequence
  source: /note="Description of Artificial Sequence: Synthetic peptide"
DINPKYDISTYNQQFKG

SEQ ID NO: 3 - protein, 16 aa, Artificial Sequence
  source: /note="Description of Artificial Sequence: Synthetic peptide"
RGFFLYYGINYYYFDV

SEQ ID NO: 4 - protein, 7 aa, Artificial Sequence
  source: /note="Description of Artificial Sequence: Synthetic peptide"
GYTFTDY

SEQ ID NO: 5 - protein, 6 aa, Artificial Sequence
  source: /note="Description of Artificial Sequence: Synthetic peptide"
NPKYDI

SEQ ID NO: 6 - protein, 10 aa, Artificial Sequence
  source: /note="Description of Artificial Sequence: Synthetic peptide"
GYTFTDYNMD

SEQ ID NO: 7 - protein, 8 aa, Artificial Sequence
  source: /note="Description of Artificial Sequence: Synthetic peptide"
GYTFTDYN

SEQ ID NO: 8 - protein, 8 aa, Artificial Sequence
  source: /note="Description of Artificial Sequence: Synthetic peptide"
INPKYDIS

SEQ ID NO: 9 - protein, 18 aa, Artificial Sequence
  source: /note="Description of Artificial Sequence: Synthetic peptide"
ARRGFFLYYGINYYYFDV

SEQ ID NO: 10 - protein, 125 aa, Artificial Sequence
  source: /note="Description of Artificial Sequence: Synthetic polypeptide"
EVQLVQSGAEVKKPGESLKISCKASGYTFTDYNMDWVRQMPGKGLEWMGDINPKYDISTYNQQFKGQVTISADKSIRTAYLQWSSLKASDTAMYYCARRGFFLYYGINYYYFDVWGQGTLVTVSS

SEQ ID NO: 11 - DNA, 375 bp, Artificial Sequence
  source: /note="Description of Artificial Sequence: Synthetic polynucleotide"
gaagtgcagctggtgcagtctggcgccgaagtgaagaagcctggcgagtccctgaagatctcctgcaaggcctccggctacaccttcaccgactacaacatggactgggtgcgacagatgcccggcaagggcctggaatggatgggcgacatcaaccctaagtacgacatctccacctacaaccagcagttcaagggccaagtgaccatctccgccgacaagtccatccggaccgcctacctgcagtggtcctccctgaaggcctctgacaccgccatgtactactgcgccagacggggcttcttcctgtactacggcatcaactactactacttcgacgtgtggggccagggcaccctcgtgacagtgtcatct

SEQ ID NO: 12 - protein, 455 aa, Artificial Sequence
  source: /note="Description of Artificial Sequence: Synthetic polypeptide"
EVQLVQSGAEVKKPGESLKISCKASGYTFTDYNMDWVRQMPGKGLEWMGDINPKYDISTYNQQFKGQVTISADKSIRTAYLQWSSLKASDTAMYYCARRGFFLYYGINYYYFDVWGQGTLVTVSSASTKGPSVFPLAPSSKSTSGGTAALGCLVKDYFPEPVTVSWNSGALTSGVHTFPAVLQSSGLYSLSSVVTVPSSSLGTQTYICNVNHKPSNTKVDKRVEPKSCDKTHTCPPCPAPELLGGPSVFLFPPKPKDTLMISRTPEVTCVVVDVSHEDPEVKFNWYVDGVEVHNAKTKPREEQYNSTYRVVSVLTVLHQDWLNGKEYKCKVSNKALPAPIEKTISKAKGQPREPQVYTLPPSREEMTKNQVSLTCLVKGFYPSDIAVEWESNGQPENNYKTTPPVLDSDGSFFLYSKLTVDKSRWQQGNVFSCSVMHEALHNHYTQKSLSLSPGK

SEQ ID NO: 13 - DNA, 1365 bp, Artificial Sequence
  source: /note="Description of Artificial Sequence: Synthetic polynucleotide"
gaagtgcagctggtgcagtctggcgccgaagtgaagaagcctggcgagtccctgaagatctcctgcaaggcctccggctacaccttcaccgactacaacatggactgggtgcgacagatgcccggcaagggcctggaatggatgggcgacatcaaccctaagtacgacatctccacctacaaccagcagttcaagggccaagtgaccatctccgccgacaagtccatccggaccgcctacctgcagtggtcctccctgaaggcctctgacaccgccatgtactactgcgccagacggggcttcttcctgtactacggcatcaactactactacttcgacgtgtggggccagggcaccctcgtgacagtgtcatctgctagcaccaagggcccaagtgtgtttcccctggcccccagcagcaagtctacttccggcggaactgctgccctgggttgcctggtgaaggactacttccccgagcccgtgacagtgtcctggaactctggggctctgacttccggcgtgcacaccttccccgccgtgctgcagagcagcggcctgtacagcctgagcagcgtggtgacagtgccctccagctctctgggaacccagacctatatctgcaacgtgaaccacaagcccagcaacaccaaggtggacaagagagtggagcccaagagctgcgacaagacccacacctgccccccctgcccagctccagaactgctgggagggccttccgtgttcctgttcccccccaagcccaaggacaccctgatgatcagcaggacccccgaggtgacctgcgtggtggtggacgtgtcccacgaggacccagaggtgaagttcaactggtacgtggacggcgtggaggtgcacaacgccaagaccaagcccagagaggagcagtacaacagcacctacagggtggtgtccgtgctgaccgtgctgcaccaggactggctgaacggcaaagaatacaagtgcaaagtctccaacaaggccctgccagccccaatcgaaaagacaatcagcaaggccaagggccagccacgggagccccaggtgtacaccctgccccccagccgggaggagatgaccaagaaccaggtgtccctgacctgtctggtgaagggcttctaccccagcgatatcgccgtggagtgggagagcaacggccagcccgagaacaactacaagaccacccccccagtgctggacagcgacggcagcttcttcctgtacagcaagctgaccgtggacaagtccaggtggcagcagggcaacgtgttcagctgcagcgtgatgcacgaggccctgcacaaccactacacccagaagtccctgagcctgagccccggcaag

SEQ ID NO: 14 - protein, 10 aa, Artificial Sequence
  source: /note="Description of Artificial Sequence: Synthetic peptide"
SASSSVSYIH

SEQ ID NO: 15 - protein, 7 aa, Artificial Sequence
  source: /note="Description of Artificial Sequence: Synthetic peptide"
STSNLAS

SEQ ID NO: 16 - protein, 9 aa, Artificial Sequence
  source: /note="Description of Artificial Sequence: Synthetic peptide"
HQWSSYPWT

SEQ ID NO: 17 - protein, 6 aa, Artificial Sequence
  source: /note="Description of Artificial Sequence: Synthetic peptide"
SSSVSY

SEQ ID NO: 18 - protein, 3 aa, Artificial Sequence
  source: /note="Description of Artificial Sequence: Synthetic peptide"
STS

SEQ ID NO: 19 - protein, 6 aa, Artificial Sequence
  source: /note="Description of Artificial Sequence: Synthetic peptide"
WSSYPW

SEQ ID NO: 20 - protein, 5 aa, Artificial Sequence
  source: /note="Description of Artificial Sequence: Synthetic peptide"
SSVSY

SEQ ID NO: 21 - protein, 106 aa, Artificial Sequence
  source: /note="Description of Artificial Sequence: Synthetic polypeptide"
DIQLTQSPSSLSASVGDRVTITCSASSSVSYIHWFQQKPGKAPKLLIYSTSNLASGVPSRFSGSGSGTFFTLTISSLQPEDFATYFCHQWSSYPWTFGQGTKVEIK

SEQ ID NO: 22 - DNA, 318 bp, Artificial Sequence
  source: /note="Description of Artificial Sequence: Synthetic polynucleotide"
gatatccagctgacccagtccccttccagcctgtctgcctctgtgggcgacagagtgacaattacctgctccgcctcctcctccgtgtcctacatccactggttccagcagaagcccggcaaggcccccaagctgctgatctactccacctccaacctggcctccggcgtgccctctagattctccggctctggctctggcaccttttttaccctgaccatctccagcctgcagcccgaggacttcgccacctacttttgccaccagtggtccagctacccctggacctttggccagggcaccaaggtggaaatcaag

SEQ ID NO: 23 - protein, 213 aa, Artificial Sequence
  source: /note="Description of Artificial Sequence: Synthetic polypeptide"
DIQLTQSPSSLSASVGDRVTITCSASSSVSYIHWFQQKPGKAPKLLIYSTSNLASGVPSRFSGSGSGTFFTLTISSLQPEDFATYFCHQWSSYPWTFGQGTKVEIKRTVAAPSVFIFPPSDEQLKSGTASVVCLLNNFYPREAKVQWKVDNALQSGNSQESVTEQDSKDSTYSLSSTLTLSKADYEKHKVYACEVTHQGLSSPVTKSFNRGEC

SEQ ID NO: 24 - DNA, 639 bp, Artificial Sequence
  source: /note="Description of Artificial Sequence: Synthetic polynucleotide"
gatatccagctgacccagtccccttccagcctgtctgcctctgtgggcgacagagtgacaattacctgctccgcctcctcctccgtgtcctacatccactggttccagcagaagcccggcaaggcccccaagctgctgatctactccacctccaacctggcctccggcgtgccctctagattctccggctctggctctggcaccttttttaccctgaccatctccagcctgcagcccgaggacttcgccacctacttttgccaccagtggtccagctacccctggacctttggccagggcaccaaggtggaaatcaagcgtacggtggccgctcccagcgtgttcatcttcccccccagcgacgagcagctgaagagtggcaccgccagcgtggtgtgcctgctgaacaacttctacccccgggaggccaaggtgcagtggaaggtggacaacgccctgcagagcggcaacagccaggagagcgtcaccgagcaggacagcaaggactccacctacagcctgagcagcaccctgaccctgagcaaggccgactacgagaagcataaggtgtacgcctgcgaggtgacccaccagggcctgtccagccccgtgaccaagagcttcaacaggggcgagtgc

SEQ ID NO: 25 - protein, 125 aa, Artificial Sequence
  source: /note="Description of Artificial Sequence: Synthetic polypeptide"
QVQLVQSGAEVVKPGASVKISCKASGYTFTDYNMDWVKQAPGQRLEWIGDINPKYDISTYNQQFKGKATITVDKSASTAYMELSSLRSEDTAVYYCARRGFFLYYGINYYYFDVWGQGTLVTVSS

SEQ ID NO: 26 - DNA, 375 bp, Artificial Sequence
  source: /note="Description of Artificial Sequence: Synthetic polynucleotide"
caggtgcagctggtgcagtctggcgccgaggtggtgaaacctggcgcctccgtgaagatctcctgcaaggcctccggctacaccttcaccgactacaacatggactgggtgaaacaggcccctggccagcggctggaatggatcggcgacatcaaccctaagtacgacatctccacctacaaccagcagttcaagggcaaggccaccatcaccgtggacaagtccgcctccaccgcctacatggaactgtcctccctgcggagcgaggacaccgccgtgtactactgcgccagacggggcttcttcctgtactacggcatcaactactactacttcgacgtgtggggccagggcaccctggtgacagtgtcctcc

SEQ ID NO: 27 - protein, 455 aa, Artificial Sequence
  source: /note="Description of Artificial Sequence: Synthetic polypeptide"
QVQLVQSGAEVVKPGASVKISCKASGYTFTDYNMDWVKQAPGQRLEWIGDINPKYDISTYNQQFKGKATITVDKSASTAYMELSSLRSEDTAVYYCARRGFFLYYGINYYYFDVWGQGTLVTVSSASTKGPSVFPLAPSSKSTSGGTAALGCLVKDYFPEPVTVSWNSGALTSGVHTFPAVLQSSGLYSLSSVVTVPSSSLGTQTYICNVNHKPSNTKVDKRVEPKSCDKTHTCPPCPAPELLGGPSVFLFPPKPKDTLMISRTPEVTCVVVDVSHEDPEVKFNWYVDGVEVHNAKTKPREEQYNSTYRVVSVLTVLHQDWLNGKEYKCKVSNKALPAPIEKTISKAKGQPREPQVYTLPPSREEMTKNQVSLTCLVKGFYPSDIAVEWESNGQPENNYKTTPPVLDSDGSFFLYSKLTVDKSRWQQGNVFSCSVMHEALHNHYTQKSLSLSPGK

SEQ ID NO: 28 - DNA, 1365 bp, Artificial Sequence
  source: /note="Description of Artificial Sequence: Synthetic polynucleotide"
caggtgcagctggtgcagtctggcgccgaggtggtgaaacctggcgcctccgtgaagatctcctgcaaggcctccggctacaccttcaccgactacaacatggactgggtgaaacaggcccctggccagcggctggaatggatcggcgacatcaaccctaagtacgacatctccacctacaaccagcagttcaagggcaaggccaccatcaccgtggacaagtccgcctccaccgcctacatggaactgtcctccctgcggagcgaggacaccgccgtgtactactgcgccagacggggcttcttcctgtactacggcatcaactactactacttcgacgtgtggggccagggcaccctggtgacagtgtcctccgctagcaccaagggcccaagtgtgtttcccctggcccccagcagcaagtctacttccggcggaactgctgccctgggttgcctggtgaaggactacttccccgagcccgtgacagtgtcctggaactctggggctctgacttccggcgtgcacaccttccccgccgtgctgcagagcagcggcctgtacagcctgagcagcgtggtgacagtgccctccagctctctgggaacccagacctatatctgcaacgtgaaccacaagcccagcaacaccaaggtggacaagagagtggagcccaagagctgcgacaagacccacacctgccccccctgcccagctccagaactgctgggagggccttccgtgttcctgttcccccccaagcccaaggacaccctgatgatcagcaggacccccgaggtgacctgcgtggtggtggacgtgtcccacgaggacccagaggtgaagttcaactggtacgtggacggcgtggaggtgcacaacgccaagaccaagcccagagaggagcagtacaacagcacctacagggtggtgtccgtgctgaccgtgctgcaccaggactggctgaacggcaaagaatacaagtgcaaagtctccaacaaggccctgccagccccaatcgaaaagacaatcagcaaggccaagggccagccacgggagccccaggtgtacaccctgccccccagccgggaggagatgaccaagaaccaggtgtccctgacctgtctggtgaagggcttctaccccagcgatatcgccgtggagtgggagagcaacggccagcccgagaacaactacaagaccacccccccagtgctggacagcgacggcagcttcttcctgtacagcaagctgaccgtggacaagtccaggtggcagcagggcaacgtgttcagctgcagcgtgatgcacgaggccctgcacaaccactacacccagaagtccctgagcctgagccccggcaag

SEQ ID NO: 29 - protein, 106 aa, Artificial Sequence
  source: /note="Description of Artificial Sequence: Synthetic polypeptide"
EIVLTQSPATLSASPGERITLSCSASSSVSYIHWYQQKPGQAPRLLIYSTSNLASGIPARFSGSGSGTFYTLTISSVEPEDAAVYYCHQWSSYPWTFGGGTKLEIK

SEQ ID NO: 30 - DNA, 318 bp, Artificial Sequence
  source: /note="Description of Artificial Sequence: Synthetic polynucleotide"
gagatcgtgctgacccagtcccctgccaccctgtctgccagccctggcgagcggatcaccctgtcctgctccgcctcctcctccgtgtcctacatccactggtatcagcagaagcccggccaggcccctcggctgctgatctactccacctccaacctggcctccggcatccctgccagattctccggctctggctccggcaccttttacaccctgaccatctccagcgtggaacccgaggacgccgccgtgtactactgccaccagtggtccagctacccctggaccttcggcggaggcaccaagctggaaatcaag

SEQ ID NO: 31 - protein, 213 aa, Artificial Sequence
  source: /note="Description of Artificial Sequence: Synthetic polypeptide"
EIVLTQSPATLSASPGERITLSCSASSSVSYIHWYQQKPGQAPRLLIYSTSNLASGIPARFSGSGSGTFYTLTISSVEPEDAAVYYCHQWSSYPWTFGGGTKLEIKRTVAAPSVFIFPPSDEQLKSGTASVVCLLNNFYPREAKVQWKVDNALQSGNSQESVTEQDSKDSTYSLSSTLTLSKADYEKHKVYACEVTHQGLSSPVTKSFNRGEC

SEQ ID NO: 32 - DNA, 639 bp, Artificial Sequence
  source: /note="Description of Artificial Sequence: Synthetic polynucleotide"
gagatcgtgctgacccagtcccctgccaccctgtctgccagccctggcgagcggatcaccctgtcctgctccgcctcctcctccgtgtcctacatccactggtatcagcagaagcccggccaggcccctcggctgctgatctactccacctccaacctggcctccggcatccctgccagattctccggctctggctccggcaccttttacaccctgaccatctccagcgtggaacccgaggacgccgccgtgtactactgccaccagtggtccagctacccctggaccttcggcggaggcaccaagctggaaatcaagcgtacggtggccgctcccagcgtgttcatcttcccccccagcgacgagcagctgaagagtggcaccgccagcgtggtgtgcctgctgaacaacttctacccccgggaggccaaggtgcagtggaaggtggacaacgccctgcagagcggcaacagccaggagagcgtcaccgagcaggacagcaaggactccacctacagcctgagcagcaccctgaccctgagcaaggccgactacgagaagcataaggtgtacgcctgcgaggtgacccaccagggcctgtccagccccgtgaccaagagcttcaacaggggcgagtgc

SEQ ID NO: 33 - protein, 125 aa, Artificial Sequence
  source: /note="Description of Artificial Sequence: Synthetic polypeptide"
QVQLVQSGAEVVKPGASVKISCKASGYTFTDYNMDWVKQAPGQRLEWIGDINPKYDISTYNQQFKGKATITVDTSASTAYMELSSLRSEDTAVYYCARRGFFLYYGINYYYFDVWGQGTLVTVSS

SEQ ID NO: 34 - DNA, 375 bp, Artificial Sequence
  source: /note="Description of Artificial Sequence: Synthetic polynucleotide"
caggtgcagctggtgcagtctggcgccgaggtggtgaaacctggcgcctccgtgaagatctcctgcaaggcctccggctacaccttcaccgactacaacatggactgggtgaaacaggcccctggccagcggctggaatggatcggcgacatcaaccctaagtacgacatctccacctacaaccagcagttcaagggcaaggccaccatcaccgtggacacctccgcctccaccgcctacatggaactgtcctccctgcggagcgaggacaccgccgtgtactactgcgccagacggggcttcttcctgtactacggcatcaactactactacttcgacgtgtggggccagggcaccctggtgacagtgtcctcc

SEQ ID NO: 35 - protein, 455 aa, Artificial Sequence
  source: /note="Description of Artificial Sequence: Synthetic polypeptide"
QVQLVQSGAEVVKPGASVKISCKASGYTFTDYNMDWVKQAPGQRLEWIGDINPKYDISTYNQQFKGKATITVDTSASTAYMELSSLRSEDTAVYYCARRGFFLYYGINYYYFDVWGQGTLVTVSSASTKGPSVFPLAPSSKSTSGGTAALGCLVKDYFPEPVTVSWNSGALTSGVHTFPAVLQSSGLYSLSSVVTVPSSSLGTQTYICNVNHKPSNTKVDKRVEPKSCDKTHTCPPCPAPELLGGPSVFLFPPKPKDTLMISRTPEVTCVVVDVSHEDPEVKFNWYVDGVEVHNAKTKPREEQYNSTYRVVSVLTVLHQDWLNGKEYKCKVSNKALPAPIEKTISKAKGQPREPQVYTLPPSREEMTKNQVSLTCLVKGFYPSDIAVEWESNGQPENNYKTTPPVLDSDGSFFLYSKLTVDKSRWQQGNVFSCSVMHEALHNHYTQKSLSLSPGK

SEQ ID NO: 36 - DNA, 1365 bp, Artificial Sequence
  source: /note="Description of Artificial Sequence: Synthetic polynucleotide"
caggtgcagctggtgcagtctggcgccgaggtggtgaaacctggcgcctccgtgaagatctcctgcaaggcctccggctacaccttcaccgactacaacatggactgggtgaaacaggcccctggccagcggctggaatggatcggcgacatcaaccctaagtacgacatctccacctacaaccagcagttcaagggcaaggccaccatcaccgtggacacctccgcctccaccgcctacatggaactgtcctccctgcggagcgaggacaccgccgtgtactactgcgccagacggggcttcttcctgtactacggcatcaactactactacttcgacgtgtggggccagggcaccctggtgacagtgtcctccgctagcaccaagggcccaagtgtgtttcccctggcccccagcagcaagtctacttccggcggaactgctgccctgggttgcctggtgaaggactacttccccgagcccgtgacagtgtcctggaactctggggctctgacttccggcgtgcacaccttccccgccgtgctgcagagcagcggcctgtacagcctgagcagcgtggtgacagtgccctccagctctctgggaacccagacctatatctgcaacgtgaaccacaagcccagcaacaccaaggtggacaagagagtggagcccaagagctgcgacaagacccacacctgccccccctgcccagctccagaactgctgggagggccttccgtgttcctgttcccccccaagcccaaggacaccctgatgatcagcaggacccccgaggtgacctgcgtggtggtggacgtgtcccacgaggacccagaggtgaagttcaactggtacgtggacggcgtggaggtgcacaacgccaagaccaagcccagagaggagcagtacaacagcacctacagggtggtgtccgtgctgaccgtgctgcaccaggactggctgaacggcaaagaatacaagtgcaaagtctccaacaaggccctgccagccccaatcgaaaagacaatcagcaaggccaagggccagccacgggagccccaggtgtacaccctgccccccagccgggaggagatgaccaagaaccaggtgtccctgacctgtctggtgaagggcttctaccccagcgatatcgccgtggagtgggagagcaacggccagcccgagaacaactacaagaccacccccccagtgctggacagcgacggcagcttcttcctgtacagcaagctgaccgtggacaagtccaggtggcagcagggcaacgtgttcagctgcagcgtgatgcacgaggccctgcacaaccactacacccagaagtccctgagcctgagccccggcaag

SEQ ID NO: 37 - protein, 6 aa, Artificial Sequence
  source: /note="Description of Artificial Sequence: Synthetic peptide"
SGYYWN

SEQ ID NO: 38 - protein, 16 aa, Artificial Sequence
  source: /note="Description of Artificial Sequence: Synthetic peptide"
YISYDADNNYNPSLKN

SEQ ID NO: 39 - protein, 20 aa, Artificial Sequence
  source: /note="Description of Artificial Sequence: Synthetic peptide"
GYYRYGLGSYRGSYYYVMDY

SEQ ID NO: 40 - protein, 8 aa, Artificial Sequence
  source: /note="Description of Artificial Sequence: Synthetic peptide"
GYSITSGY

SEQ ID NO: 41 - protein, 5 aa, Artificial Sequence
  source: /note="Description of Artificial Sequence: Synthetic peptide"
SYDAD

SEQ ID NO: 42 - protein, 11 aa, Artificial Sequence
  source: /note="Description of Artificial Sequence: Synthetic peptide"
GYSITSGYYWN

SEQ ID NO: 43 - protein, 9 aa, Artificial Sequence
  source: /note="Description of Artificial Sequence: Synthetic peptide"
GYSITSGYY

SEQ ID NO: 44 - protein, 7 aa, Artificial Sequence
  source: /note="Description of Artificial Sequence: Synthetic peptide"
ISYDADN

SEQ ID NO: 45 - protein, 22 aa, Artificial Sequence
  source: /note="Description of Artificial Sequence: Synthetic peptide"
AGGYYRYGLGSYRGSYYYVMDY

SEQ ID NO: 46 - protein, 129 aa, Artificial Sequence
  source: /note="Description of Artificial Sequence: Synthetic polypeptide"
QIQLQESGPGLVKPSQTLSLTCTVSGYSITSGYYWNWIRQHPGKGLEWIGYISYDADNNYNPSLKNRVTISRDTSKNQFSLKLSSVTAADTAVYYCAGGYYRYGLGSYRGSYYYVMDYWGQGTTVTVSS

SEQ ID NO: 47 - DNA, 387 bp, Artificial Sequence
  source: /note="Description of Artificial Sequence: Synthetic polynucleotide"
cagatccagctgcaggaatctggccctggcctggtgaaaccctcccagaccctgtccctgacctgcaccgtgtccggctactccatcacctccggctactactggaactggatccggcagcaccccggcaagggcctggaatggatcggctacatctcctacgacgctgacaacaactacaaccccagcctgaagaacagagtgaccatctcccgggacacctccaagaaccagttctccctgaagctgtcctccgtgaccgccgctgacaccgccgtgtactactgcgctggcggctactacagatacggcctgggctcctaccggggctcctactactacgtgatggactactggggccagggcaccaccgtgaccgtgtcctct

SEQ ID NO: 48 - protein, 459 aa, Artificial Sequence
  source: /note="Description of Artificial Sequence: Synthetic polypeptide"
QIQLQESGPGLVKPSQTLSLTCTVSGYSITSGYYWNWIRQHPGKGLEWIGYISYDADNNYNPSLKNRVTISRDTSKNQFSLKLSSVTAADTAVYYCAGGYYRYGLGSYRGSYYYVMDYWGQGTTVTVSSASTKGPSVFPLAPSSKSTSGGTAALGCLVKDYFPEPVTVSWNSGALTSGVHTFPAVLQSSGLYSLSSVVTVPSSSLGTQTYICNVNHKPSNTKVDKRVEPKSCDKTHTCPPCPAPELLGGPSVFLFPPKPKDTLMISRTPEVTCVVVDVSHEDPEVKFNWYVDGVEVHNAKTKPREEQYNSTYRVVSVLTVLHQDWLNGKEYKCKVSNKALPAPIEKTISKAKGQPREPQVYTLPPSREEMTKNQVSLTCLVKGFYPSDIAVEWESNGQPENNYKTTPPVLDSDGSFFLYSKLTVDKSRWQQGNVFSCSVMHEALHNHYTQKSLSLSPGK

SEQ ID NO: 49 - DNA, 1377 bp, Artificial Sequence
  source: /note="Description of Artificial Sequence: Synthetic polynucleotide"
cagatccagctgcaggaatctggccctggcctggtgaaaccctcccagaccctgtccctgacctgcaccgtgtccggctactccatcacctccggctactactggaactggatccggcagcaccccggcaagggcctggaatggatcggctacatctcctacgacgctgacaacaactacaaccccagcctgaagaacagagtgaccatctcccgggacacctccaagaaccagttctccctgaagctgtcctccgtgaccgccgctgacaccgccgtgtactactgcgctggcggctactacagatacggcctgggctcctaccggggctcctactactacgtgatggactactggggccagggcaccaccgtgaccgtgtcctctgctagcaccaagggcccaagtgtgtttcccctggcccccagcagcaagtctacttccggcggaactgctgccctgggttgcctggtgaaggactacttccccgagcccgtgacagtgtcctggaactctggggctctgacttccggcgtgcacaccttccccgccgtgctgcagagcagcggcctgtacagcctgagcagcgtggtgacagtgccctccagctctctgggaacccagacctatatctgcaacgtgaaccacaagcccagcaacaccaaggtggacaagagagtggagcccaagagctgcgacaagacccacacctgccccccctgcccagctccagaactgctgggagggccttccgtgttcctgttcccccccaagcccaaggacaccctgatgatcagcaggacccccgaggtgacctgcgtggtggtggacgtgtcccacgaggacccagaggtgaagttcaactggtacgtggacggcgtggaggtgcacaacgccaagaccaagcccagagaggagcagtacaacagcacctacagggtggtgtccgtgctgaccgtgctgcaccaggactggctgaacggcaaagaatacaagtgcaaagtctccaacaaggccctgccagccccaatcgaaaagacaatcagcaaggccaagggccagccacgggagccccaggtgtacaccctgccccccagccgggaggagatgaccaagaaccaggtgtccctgacctgtctggtgaagggcttctaccccagcgatatcgccgtggagtgggagagcaacggccagcccgagaacaactacaagaccacccccccagtgctggacagcgacggcagcttcttcctgtacagcaagctgaccgtggacaagtccaggtggcagcagggcaacgtgttcagctgcagcgtgatgcacgaggccctgcacaaccactacacccagaagtccctgagcctgagccccggcaag

SEQ ID NO: 50 - protein, 15 aa, Artificial Sequence
  source: /note="Description of Artificial Sequence: Synthetic peptide"
KASQSVDYEGHSYMN

SEQ ID NO: 51 - protein, 7 aa, Artificial Sequence
  source: /note="Description of Artificial Sequence: Synthetic peptide"
AASNLES

SEQ ID NO: 52 - protein, 9 aa, Artificial Sequence
  source: /note="Description of Artificial Sequence: Synthetic peptide"
QQSNEDPPT

SEQ ID NO: 53 - protein, 11 aa, Artificial Sequence
  source: /note="Description of Artificial Sequence: Synthetic peptide"
SQSVDYEGHSY

SEQ ID NO: 54 - protein, 3 aa, Artificial Sequence
  source: /note="Description of Artificial Sequence: Synthetic peptide"
AAS

SEQ ID NO: 55 - protein, 6 aa, Artificial Sequence
  source: /note="Description of Artificial Sequence: Synthetic peptide"
SNEDPP

SEQ ID NO: 56 - protein, 10 aa, Artificial Sequence
  source: /note="Description of Artificial Sequence: Synthetic peptide"
QSVDYEGHSY

SEQ ID NO: 57 - protein, 111 aa, Artificial Sequence
  source: /note="Description of Artificial Sequence: Synthetic polypeptide"
ETVLTQSPATLSVSPGERATISCKASQSVDYEGHSYMNWYQQKPGQAPRLLIYAASNLESGIPARFSGSGSGTDFTLTISSVEPEDAATYYCQQSNEDPPTFGGGTKLEIK

SEQ ID NO: 58 - DNA, 333 bp, Artificial Sequence
  source: /note="Description of Artificial Sequence: Synthetic polynucleotide"
gagacagtgctgacccagtcccctgccaccctgtccgtgtctcccggcgagagagccaccatcagctgcaaggcctcccagtccgtggactacgaaggccattcctacatgaactggtatcagcagaagcccggccaggcccctcggctgctgatctacgccgcctccaacctggaatccggcatccctgcccggttctccggctctggctctggcaccgacttcaccctgaccatctccagcgtggaacccgaggacgccgccacctactactgccagcagtccaacgaggacccccccaccttcggcggaggcaccaagctggaaatcaag

SEQ ID NO: 59 - protein, 218 aa, Artificial Sequence
  source: /note="Description of Artificial Sequence: Synthetic polypeptide"
ETVLTQSPATLSVSPGERATISCKASQSVDYEGHSYMNWYQQKPGQAPRLLIYAASNLESGIPARFSGSGSGTDFTLTISSVEPEDAATYYCQQSNEDPPTFGGGTKLEIKRTVAAPSVFIFPPSDEQLKSGTASVVCLLNNFYPREAKVQWKVDNALQSGNSQESVTEQDSKDSTYSLSSTLTLSKADYEKHKVYACEVTHQGLSSPVTKSFNRGEC

SEQ ID NO: 60 - DNA, 654 bp, Artificial Sequence
  source: /note="Description of Artificial Sequence: Synthetic polynucleotide"
gagacagtgctgacccagtcccctgccaccctgtccgtgtctcccggcgagagagccaccatcagctgcaaggcctcccagtccgtggactacgaaggccattcctacatgaactggtatcagcagaagcccggccaggcccctcggctgctgatctacgccgcctccaacctggaatccggcatccctgcccggttctccggctctggctctggcaccgacttcaccctgaccatctccagcgtggaacccgaggacgccgccacctactactgccagcagtccaacgaggacccccccaccttcggcggaggcaccaagctggaaatcaagcgtacggtggccgctcccagcgtgttcatcttcccccccagcgacgagcagctgaagagtggcaccgccagcgtggtgtgcctgctgaacaacttctacccccgggaggccaaggtgcagtggaaggtggacaacgccctgcagagcggcaacagccaggagagcgtcaccgagcaggacagcaaggactccacctacagcctgagcagcaccctgaccctgagcaaggccgactacgagaagcataaggtgtacgcctgcgaggtgacccaccagggcctgtccagccccgtgaccaagagcttcaacaggggcgagtgc

SEQ ID NO: 61 - protein, 15 aa, Artificial Sequence
  source: /note="Description of Artificial Sequence: Synthetic peptide"
KASQSVDYDGNSYMN

SEQ ID NO: 62 - protein, 11 aa, Artificial Sequence
  source: /note="Description of Artificial Sequence: Synthetic peptide"
SQSVDYDGNSY

SEQ ID NO: 63 - protein, 10 aa, Artificial Sequence
  source: /note="Description of Artificial Sequence: Synthetic peptide"
QSVDYDGNSY

SEQ ID NO: 64 - protein, 111 aa, Artificial Sequence
  source: /note="Description of Artificial Sequence: Synthetic polypeptide"
ETVLTQSPATLSVSPGERATISCKASQSVDYDGNSYMNWYQQKPGQAPRLLIYAASNLESGIPARFSGSGSGTDFTLTISSVEPEDAATYYCQQSNEDPPTFGGGTKLEIK

SEQ ID NO: 65 - DNA, 333 bp, Artificial Sequence
  source: /note="Description of Artificial Sequence: Synthetic polynucleotide"
gagacagtgctgacccagtcccctgccaccctgtccgtgtctcccggcgagagagccaccatcagctgcaaggcctcccagtccgtggactacgacggcaactcctacatgaactggtatcagcagaagcccggccaggcccctcggctgctgatctacgccgcctccaacctggaatccggcatccctgcccggttctccggctctggctctggcaccgacttcaccctgaccatctccagcgtggaacccgaggacgccgccacctactactgccagcagtccaacgaggacccccccaccttcggcggaggcaccaagctggaaatcaag

SEQ ID NO: 66 - protein, 218 aa, Artificial Sequence
  source: /note="Description of Artificial Sequence: Synthetic polypeptide"
ETVLTQSPATLSVSPGERATISCKASQSVDYDGNSYMNWYQQKPGQAPRLLIYAASNLESGIPARFSGSGSGTDFTLTISSVEPEDAATYYCQQSNEDPPTFGGGTKLEIKRTVAAPSVFIFPPSDEQLKSGTASVVCLLNNFYPREAKVQWKVDNALQSGNSQESVTEQDSKDSTYSLSSTLTLSKADYEKHKVYACEVTHQGLSSPVTKSFNRGEC

SEQ ID NO: 67 - DNA, 654 bp, Artificial Sequence
  source: /note="Description of Artificial Sequence: Synthetic polynucleotide"
gagacagtgctgacccagtcccctgccaccctgtccgtgtctcccggcgagagagccaccatcagctgcaaggcctcccagtccgtggactacgacggcaactcctacatgaactggtatcagcagaagcccggccaggcccctcggctgctgatctacgccgcctccaacctggaatccggcatccctgcccggttctccggctctggctctggcaccgacttcaccctgaccatctccagcgtggaacccgaggacgccgccacctactactgccagcagtccaacgaggacccccccaccttcggcggaggcaccaagctggaaatcaagcgtacggtggccgctcccagcgtgttcatcttcccccccagcgacgagcagctgaagagtggcaccgccagcgtggtgtgcctgctgaacaacttctacccccgggaggccaaggtgcagtggaaggtggacaacgccctgcagagcggcaacagccaggagagcgtcaccgagcaggacagcaaggactccacctacagcctgagcagcaccctgaccctgagcaaggccgactacgagaagcataaggtgtacgcctgcgaggtgacccaccagggcctgtccagccccgtgaccaagagcttcaacaggggcgagtgc

SEQ ID NO: 68 - protein, 20 aa, Artificial Sequence
  source: /note="Description of Artificial Sequence: Synthetic peptide"
GYYRYGLGSYSGSYYYVMDY

SEQ ID NO: 69 - protein, 22 aa, Artificial Sequence
  source: /note="Description of Artificial Sequence: Synthetic peptide"
AGGYYRYGLGSYSGSYYYVMDY

SEQ ID NO: 70 - protein, 129 aa, Artificial Sequence
  source: /note="Description of Artificial Sequence: Synthetic polypeptide"
QVQLQESGPGLVKPSQTLSLTCTVSGYSITSGYYWNWIRQHPGKGLEWMGYISYDADNNYNPSLKNRITISRDTSKNQFSLKLSSVTAADTAVYYCAGGYYRYGLGSYSGSYYYVMDYWGQGTTVTVSS

SEQ ID NO: 71 - DNA, 387 bp, Artificial Sequence
  source: /note="Description of Artificial Sequence: Synthetic polynucleotide"
caggtgcagctgcaggaatctggccctggcctggtgaaaccctcccagaccctgtccctgacctgcaccgtgtccggctactccatcacctccggctactactggaactggatccggcagcaccccggcaagggcctggaatggatgggctacatctcctacgacgctgacaacaactacaaccccagcctgaagaacagaatcaccatctcccgggacacctccaagaaccagttctccctgaagctgtcctccgtgaccgccgctgacaccgccgtgtactactgcgctggcggctactacagatacggcctgggctcctactccggctcctactactacgtgatggactactggggccagggcaccaccgtgaccgtgtcctct

SEQ ID NO: 72 - protein, 459 aa, Artificial Sequence
  source: /note="Description of Artificial Sequence: Synthetic polypeptide"
QVQLQESGPGLVKPSQTLSLTCTVSGYSITSGYYWNWIRQHPGKGLEWMGYISYDADNNYNPSLKNRITISRDTSKNQFSLKLSSVTAADTAVYYCAGGYYRYGLGSYSGSYYYVMDYWGQGTTVTVSSASTKGPSVFPLAPSSKSTSGGTAALGCLVKDYFPEPVTVSWNSGALTSGVHTFPAVLQSSGLYSLSSVVTVPSSSLGTQTYICNVNHKPSNTKVDKRVEPKSCDKTHTCPPCPAPELLGGPSVFLFPPKPKDTLMISRTPEVTCVVVDVSHEDPEVKFNWYVDGVEVHNAKTKPREEQYNSTYRVVSVLTVLHQDWLNGKEYKCKVSNKALPAPIEKTISKAKGQPREPQVYTLPPSREEMTKNQVSLTCLVKGFYPSDIAVEWESNGQPENNYKTTPPVLDSDGSFFLYSKLTVDKSRWQQGNVFSCSVMHEALHNHYTQKSLSLSPGK

SEQ ID NO: 73 - DNA, 1377 bp, Artificial Sequence
  source: /note="Description of Artificial Sequence: Synthetic polynucleotide"
caggtgcagctgcaggaatctggccctggcctggtgaaaccctcccagaccctgtccctgacctgcaccgtgtccggctactccatcacctccggctactactggaactggatccggcagcaccccggcaagggcctggaatggatgggctacatctcctacgacgctgacaacaactacaaccccagcctgaagaacagaatcaccatctcccgggacacctccaagaaccagttctccctgaagctgtcctccgtgaccgccgctgacaccgccgtgtactactgcgctggcggctactacagatacggcctgggctcctactccggctcctactactacgtgatggactactggggccagggcaccaccgtgaccgtgtcctctgctagcaccaagggcccaagtgtgtttcccctggcccccagcagcaagtctacttccggcggaactgctgccctgggttgcctggtgaaggactacttccccgagcccgtgacagtgtcctggaactctggggctctgacttccggcgtgcacaccttccccgccgtgctgcagagcagcggcctgtacagcctgagcagcgtggtgacagtgccctccagctctctgggaacccagacctatatctgcaacgtgaaccacaagcccagcaacaccaaggtggacaagagagtggagcccaagagctgcgacaagacccacacctgccccccctgcccagctccagaactgctgggagggccttccgtgttcctgttcccccccaagcccaaggacaccctgatgatcagcaggacccccgaggtgacctgcgtggtggtggacgtgtcccacgaggacccagaggtgaagttcaactggtacgtggacggcgtggaggtgcacaacgccaagaccaagcccagagaggagcagtacaacagcacctacagggtggtgtccgtgctgaccgtgctgcaccaggactggctgaacggcaaagaatacaagtgcaaagtctccaacaaggccctgccagccccaatcgaaaagacaatcagcaaggccaagggccagccacgggagccccaggtgtacaccctgccccccagccgggaggagatgaccaagaaccaggtgtccctgacctgtctggtgaagggcttctaccccagcgatatcgccgtggagtgggagagcaacggccagcccgagaacaactacaagaccacccccccagtgctggacagcgacggcagcttcttcctgtacagcaagctgaccgtggacaagtccaggtggcagcagggcaacgtgttcagctgcagcgtgatgcacgaggccctgcacaaccactacacccagaagtccctgagcctgagccccggcaag

SEQ ID NO: 74 - protein, 111 aa, Artificial Sequence
  source: /note="Description of Artificial Sequence: Synthetic polypeptide"
DTQMTQSPSSLSVSVGDRATITCKASQSVDYEGHSYMNWYQQKPGKAPKLLIYAASNLESGVPSRFSGSGSGTDFTLTISSVQPEDFATYYCQQSNEDPPTFGGGTKLEIK

SEQ ID NO: 75 - DNA, 333 bp, Artificial Sequence
  source: /note="Description of Artificial Sequence: Synthetic polynucleotide"
gacacccagatgacccagtccccctcctccctgtccgtgtccgtgggcgacagagccaccatcacatgcaaggcctcccagtccgtggactacgaaggccattcctacatgaactggtatcagcagaagcccggcaaggcccccaagctgctgatctacgccgcctccaacctggaatccggcgtgccctccagattctccggctccggctctggcaccgacttcaccctgaccatctccagcgtgcagcccgaggacttcgccacctactactgccagcagtccaacgaggacccccccaccttcggcggaggcaccaagctggaaatcaag

SEQ ID NO: 76 - protein, 218 aa, Artificial Sequence
  source: /note="Description of Artificial Sequence: Synthetic polypeptide"
DTQMTQSPSSLSVSVGDRATITCKASQSVDYEGHSYMNWYQQKPGKAPKLLIYAASNLESGVPSRFSGSGSGTDFTLTISSVQPEDFATYYCQQSNEDPPTFGGGTKLEIKRTVAAPSVFIFPPSDEQLKSGTASVVCLLNNFYPREAKVQWKVDNALQSGNSQESVTEQDSKDSTYSLSSTLTLSKADYEKHKVYACEVTHQGLSSPVTKSFNRGEC

SEQ ID NO: 77 - DNA, 654 bp, Artificial Sequence
  source: /note="Description of Artificial Sequence: Synthetic polynucleotide"
gacacccagatgacccagtccccctcctccctgtccgtgtccgtgggcgacagagccaccatcacatgcaaggcctcccagtccgtggactacgaaggccattcctacatgaactggtatcagcagaagcccggcaaggcccccaagctgctgatctacgccgcctccaacctggaatccggcgtgccctccagattctccggctccggctctggcaccgacttcaccctgaccatctccagcgtgcagcccgaggacttcgccacctactactgccagcagtccaacgaggacccccccaccttcggcggaggcaccaagctggaaatcaagcgtacggtggccgctcccagcgtgttcatcttcccccccagcgacgagcagctgaagagtggcaccgccagcgtggtgtgcctgctgaacaacttctacccccgggaggccaaggtgcagtggaaggtggacaacgccctgcagagcggcaacagccaggagagcgtcaccgagcaggacagcaaggactccacctacagcctgagcagcaccctgaccctgagcaaggccgactacgagaagcataaggtgtacgcctgcgaggtgacccaccagggcctgtccagccccgtgaccaagagcttcaacaggggcgagtgc

SEQ ID NO: 78 - protein, 106 aa, Artificial Sequence
  source: /note="Description of Artificial Sequence: Synthetic polypeptide"
EIVLTQSPATLSASPGEEITLSCSASSSVSYIHWYQQKPGQAPRLLIYSTSNLASGIPARFSGSGSGTFYTLTISSVEPEDAAVYYCHQWSSYPWTFGGGTKLEIK

SEQ ID NO: 79 - DNA, 318 bp, Artificial Sequence
  source: /note="Description of Artificial Sequence: Synthetic polynucleotide"
gagatcgtgctgacccagtcccctgccaccctgtctgccagccctggcgaggagatcaccctgtcctgctccgcctcctcctccgtgtcctacatccactggtatcagcagaagcccggccaggcccctcggctgctgatctactccacctccaacctggcctccggcatccctgccagattctccggctctggctccggcaccttttacaccctgaccatctccagcgtggaacccgaggacgccgccgtgtactactgccaccagtggtccagctacccctggaccttcggcggaggcaccaagctggaaatcaag

SEQ ID NO: 80 - protein, 213 aa, Artificial Sequence
  source: /note="Description of Artificial Sequence: Synthetic polypeptide"
EIVLTQSPATLSASPGEEITLSCSASSSVSYIHWYQQKPGQAPRLLIYSTSNLASGIPARFSGSGSGTFYTLTISSVEPEDAAVYYCHQWSSYPWTFGGGTKLEIKRTVAAPSVFIFPPSDEQLKSGTASVVCLLNNFYPREAKVQWKVDNALQSGNSQESVTEQDSKDSTYSLSSTLTLSKADYEKHKVYACEVTHQGLSSPVTKSFNRGEC

SEQ ID NO: 81 - DNA, 639 bp, Artificial Sequence
  source: /note="Description of Artificial Sequence: Synthetic polynucleotide"
gagatcgtgctgacccagtcccctgccaccctgtctgccagccctggcgaggagatcaccctgtcctgctccgcctcctcctccgtgtcctacatccactggtatcagcagaagcccggccaggcccctcggctgctgatctactccacctccaacctggcctccggcatccctgccagattctccggctctggctccggcaccttttacaccctgaccatctccagcgtggaacccgaggacgccgccgtgtactactgccaccagtggtccagctacccctggaccttcggcggaggcaccaagctggaaatcaagcgtacggtggccgctcccagcgtgttcatcttcccccccagcgacgagcagctgaagagtggcaccgccagcgtggtgtgcctgctgaacaacttctacccccgggaggccaaggtgcagtggaaggtggacaacgccctgcagagcggcaacagccaggagagcgtcaccgagcaggacagcaaggactccacctacagcctgagcagcaccctgaccctgagcaaggccgactacgagaagcataaggtgtacgcctgcgaggtgacccaccagggcctgtccagccccgtgaccaagagcttcaacaggggcgagtgc

SEQ ID NO: 82 - protein, 7 aa, Artificial Sequence
  source: /note="Description of Artificial Sequence: Synthetic peptide"
SSSAAWN

SEQ ID NO: 83 - protein, 18 aa, Artificial Sequence
  source: /note="Description of Artificial Sequence: Synthetic peptide"
RIYYRSKWYNDYAVSVKS

SEQ ID NO: 84 - protein, 13 aa, Artificial Sequence
  source: /note="Description of Artificial Sequence: Synthetic peptide"
GSYVTSSYEGFDY

SEQ ID NO: 85 - protein, 9 aa, Artificial Sequence
  source: /note="Description of Artificial Sequence: Synthetic peptide"
GDSVSSSSA

SEQ ID NO: 86 - protein, 7 aa, Artificial Sequence
  source: /note="Description of Artificial Sequence: Synthetic peptide"
YYRSKWY

SEQ ID NO: 87 - protein, 12 aa, Artificial Sequence
  source: /note="Description of Artificial Sequence: Synthetic peptide"
GDSVSSSSAAWN

SEQ ID NO: 88 - protein, 10 aa, Artificial Sequence
  source: /note="Description of Artificial Sequence: Synthetic peptide"
GDSVSSSSAA

SEQ ID NO: 89 - protein, 9 aa, Artificial Sequence
  source: /note="Description of Artificial Sequence: Synthetic peptide"
IYYRSKWYN

SEQ ID NO: 90 - protein, 15 aa, Artificial Sequence
  source: /note="Description of Artificial Sequence: Synthetic peptide"
ARGSYVTSSYEGFDY

SEQ ID NO: 91 - protein, 125 aa, Artificial Sequence
  source: /note="Description of Artificial Sequence: Synthetic polypeptide"
QVQLQQSGPGLVKPSQTLSLTCAISGDSVSSSSAAWNWIRQSPSRGLEWLGRIYYRSKWYNDYAVSVKSRITINPDTSKNQFSLQLNSVTPEDTAVYYCARGSYVTSSYEGFDYWGQGTLVTVSS

SEQ ID NO: 92 - DNA, 375 bp, Artificial Sequence
  source: /note="Description of Artificial Sequence: Synthetic polynucleotide"
caggtgcaattgcagcagagcggtccgggcctggtgaaaccgagccagaccctgagcctgacctgcgcgatttccggagatagcgtgagctctagctctgctgcttggaactggattcgtcagagcccgagccgtggcctcgagtggctgggccgtatctactaccgtagcaaatggtacaacgactatgccgtgagcgtgaaaagccgcattaccattaacccggatacttcgaaaaaccagtttagcctgcaactgaacagcgtgaccccggaagatacggccgtgtattattgcgcgcgtggttcttacgttacttcttcttacgaaggtttcgattactggggccaaggcaccctggtgactgttagctca

SEQ ID NO: 93 - protein, 455 aa, Artificial Sequence
  source: /note="Description of Artificial Sequence: Synthetic polypeptide"
QVQLQQSGPGLVKPSQTLSLTCAISGDSVSSSSAAWNWIRQSPSRGLEWLGRIYYRSKWYNDYAVSVKSRITINPDTSKNQFSLQLNSVTPEDTAVYYCARGSYVTSSYEGFDYWGQGTLVTVSSASTKGPSVFPLAPSSKSTSGGTAALGCLVKDYFPEPVTVSWNSGALTSGVHTFPAVLQSSGLYSLSSVVTVPSSSLGTQTYICNVNHKPSNTKVDKRVEPKSCDKTHTCPPCPAPELLGGPSVFLFPPKPKDTLMISRTPEVTCVVVDVSHEDPEVKFNWYVDGVEVHNAKTKPREEQYNSTYRVVSVLTVLHQDWLNGKEYKCKVSNKALPAPIEKTISKAKGQPREPQVYTLPPSREEMTKNQVSLTCLVKGFYPSDIAVEWESNGQPENNYKTTPPVLDSDGSFFLYSKLTVDKSRWQQGNVFSCSVMHEALHNHYTQKSLSLSPGK

SEQ ID NO: 94 - DNA, 1365 bp, Artificial Sequence
  source: /note="Description of Artificial Sequence: Synthetic polynucleotide"
caggtgcaattgcagcagagcggtccgggcctggtgaaaccgagccagaccctgagcctgacctgcgcgatttccggagatagcgtgagctctagctctgctgcttggaactggattcgtcagagcccgagccgtggcctcgagtggctgggccgtatctactaccgtagcaaatggtacaacgactatgccgtgagcgtgaaaagccgcattaccattaacccggatacttcgaaaaaccagtttagcctgcaactgaacagcgtgaccccggaagatacggccgtgtattattgcgcgcgtggttcttacgttacttcttcttacgaaggtttcgattactggggccaaggcaccctggtgactgttagctcagcctccaccaagggtccatcggtcttccccctggcaccctcctccaagagcacctctgggggcacagcggccctgggctgcctggtcaaggactacttccccgaaccggtgacggtgtcgtggaactcaggcgccctgaccagcggcgtgcacaccttcccggctgtcctacagtcctcaggactctactccctcagcagcgtggtgaccgtgccctccagcagcttgggcacccagacctacatctgcaacgtgaatcacaagcccagcaacaccaaggtggacaagagagttgagcccaaatcttgtgacaaaactcacacatgcccaccgtgcccagcacctgaactcctggggggaccgtcagtcttcctcttccccccaaaacccaaggacaccctcatgatctcccggacccctgaggtcacatgcgtggtggtggacgtgagccacgaagaccctgaggtcaagttcaactggtacgtggacggcgtggaggtgcataatgccaagacaaagccgcgggaggagcagtacaacagcacgtaccgggtggtcagcgtcctcaccgtcctgcaccaggactggctgaatggcaaggagtacaagtgcaaggtctccaacaaagccctcccagcccccatcgagaaaaccatctccaaagccaaagggcagccccgagaaccacaggtgtacaccctgcccccatcccgggaggagatgaccaagaaccaggtcagcctgacctgcctggtcaaaggcttctatcccagcgacatcgccgtggagtgggagagcaatgggcagccggagaacaactacaagaccacgcctcccgtgctggactccgacggctccttcttcctctacagcaagctcaccgtggacaagagcaggtggcagcaggggaacgtcttctcatgctccgtgatgcatgaggctctgcacaaccactacacgcagaagagcctctccctgtctccgggtaaa

SEQ ID NO: 95 - protein, 11 aa, Artificial Sequence
  source: /note="Description of Artificial Sequence: Synthetic peptide"
SGDNLPEKYAY

SEQ ID NO: 96 - protein, 7 aa, Artificial Sequence
  source: /note="Description of Artificial Sequence: Synthetic peptide"
DDNKRPS

SEQ ID NO: 97 - protein, 11 aa, Artificial Sequence
  source: /note="Description of Artificial Sequence: Synthetic peptide"
QSYGKWGWTWV

SEQ ID NO: 98 - protein, 7 aa, Artificial Sequence
  source: /note="Description of Artificial Sequence: Synthetic peptide"
DNLPEKY

SEQ ID NO: 99 - protein, 3 aa, Artificial Sequence
  source: /note="Description of Artificial Sequence: Synthetic peptide"
DDN

SEQ ID NO: 100 - protein, 8 aa, Artificial Sequence
  source: /note="Description of Artificial Sequence: Synthetic peptide"
YGKWGWTW

SEQ ID NO: 101 - protein, 6 aa, Artificial Sequence
  source: /note="Description of Artificial Sequence: Synthetic peptide"
NLPEKY

SEQ ID NO: 102 - protein, 108 aa, Artificial Sequence
  source: /note="Description of Artificial Sequence: Synthetic polypeptide"
SYELTQPLSVSVALGQTARITCSGDNLPEKYAYWYQQKPGQAPVLVIYDDNKRPSGIPERFSGSNSGNTATLTISRAQAGDEADYYCQSYGKWGWTWVFGGGTKLTVL

SEQ ID NO: 103 - DNA, 324 bp, Artificial Sequence
  source: /note="Description of Artificial Sequence: Synthetic polynucleotide"
agctacgaactgacccagccgctgtccgtgagcgtggctctgggccagaccgcgcggattacctgtagcggcgataacctgccggaaaaatacgcttactggtaccagcagaaaccgggccaggcgccggtgctggtgatctacgacgacaacaaacgtccgagcggcatcccggaacgttttagcggatccaacagcggcaacaccgcgaccctgaccattagccgcgcccaggcgggagacgaagcggattattactgccagtcttacggtaaatggggttggacttgggtgtttggcggcggcacgaagttaaccgtccta

SEQ ID NO: 104 - protein, 214 aa, Artificial Sequence
  source: /note="Description of Artificial Sequence: Synthetic polypeptide"
SYELTQPLSVSVALGQTARITCSGDNLPEKYAYWYQQKPGQAPVLVIYDDNKRPSGIPERFSGSNSGNTATLTISRAQAGDEADYYCQSYGKWGWTWVFGGGTKLTVLGQPKAAPSVTLFPPSSEELQANKATLVCLISDFYPGAVTVAWKADSSPVKAGVETTTPSKQSNNKYAASSYLSLTPEQWKSHRSYSCQVTHEGSTVEKTVAPTECS

SEQ ID NO: 105 - DNA, 642 bp, Artificial Sequence
  source: /note="Description of Artificial Sequence: Synthetic polynucleotide"
agctacgaactgacccagccgctgtccgtgagcgtggctctgggccagaccgcgcggattacctgtagcggcgataacctgccggaaaaatacgcttactggtaccagcagaaaccgggccaggcgccggtgctggtgatctacgacgacaacaaacgtccgagcggcatcccggaacgttttagcggatccaacagcggcaacaccgcgaccctgaccattagccgcgcccaggcgggagacgaagcggattattactgccagtcttacggtaaatggggttggacttgggtgtttggcggcggcacgaagttaaccgtcctaggtcagcccaaggctgccccctcggtcactctgttcccgccctcctctgaggagcttcaagccaacaaggccacactggtgtgtctcataagtgacttctacccgggagccgtgacagtggcctggaaggcagatagcagccccgtcaaggcgggagtggagaccaccacaccctccaaacaaagcaacaacaagtacgcggccagcagctatctgagcctgacgcctgagcagtggaagtcccacagaagctacagctgccaggtcacgcatgaagggagcaccgtggagaagacagtggcccctacagaatgttca

SEQ ID NO: 106 - protein, 5 aa, Artificial Sequence
  source: /note="Description of Artificial Sequence: Synthetic peptide"
SYAVS

SEQ ID NO: 107 - protein, 17 aa, Artificial Sequence
  source: /note="Description of Artificial Sequence: Synthetic peptide"
RIVPWLGHTQYAQKFQG

SEQ ID NO: 108 - protein, 11 aa, Artificial Sequence
  source: /note="Description of Artificial Sequence: Synthetic peptide"
ESPGYRYSFDV

SEQ ID NO: 109 - protein, 7 aa, Artificial Sequence
  source: /note="Description of Artificial Sequence: Synthetic peptide"
GGTFDSY

SEQ ID NO: 110 - protein, 6 aa, Artificial Sequence
  source: /note="Description of Artificial Sequence: Synthetic peptide"
VPWLGH

SEQ ID NO: 111 - protein, 10 aa, Artificial Sequence
  source: /note="Description of Artificial Sequence: Synthetic peptide"
GGTFDSYAVS

SEQ ID NO: 112 - protein, 8 aa, Artificial Sequence
  source: /note="Description of Artificial Sequence: Synthetic peptide"
GGTFDSYA

SEQ ID NO: 113 - protein, 8 aa, Artificial Sequence
  source: /note="Description of Artificial Sequence: Synthetic peptide"
IVPWLGHT

SEQ ID NO: 114 - protein, 13 aa, Artificial Sequence
  source: /note="Description of Artificial Sequence: Synthetic peptide"
ARESPGYRYSFDV

SEQ ID NO: 115 - protein, 120 aa, Artificial Sequence
  source: /note="Description of Artificial Sequence: Synthetic polypeptide"
QVQLVQSGAEVKKPGSSVKVSCKASGGTFDSYAVSWVRQAPGQGLEWMGRIVPWLGHTQYAQKFQGRVTITADESTSTAYMELSSLRSEDTAVYYCARESPGYRYSFDVWDQGTLVTVSS

SEQ ID NO: 116 - DNA, 360 bp, Artificial Sequence
  source: /note="Description of Artificial Sequence: Synthetic polynucleotide"
caggtgcaattggtgcagagcggtgccgaagtgaaaaaaccgggcagcagcgtgaaagttagctgcaaagcatccggagggacgtttgactcttacgctgtttcttgggtgcgccaggccccgggccagggcctcgagtggatgggccgtatcgttccgtggctgggccatactcagtacgcccagaaatttcagggccgggtgaccattaccgccgatgaaagcaccagcaccgcctatatggaactgagcagcctgcgcagcgaagatacggccgtgtattattgcgcgcgtgaatctccgggttaccgttactctttcgatgtttgggaccaaggcaccctggtgactgttagctca

SEQ ID NO: 117 - protein, 450 aa, Artificial Sequence
  source: /note="Description of Artificial Sequence: Synthetic polypeptide"
QVQLVQSGAEVKKPGSSVKVSCKASGGTFDSYAVSWVRQAPGQGLEWMGRIVPWLGHTQYAQKFQGRVTITADESTSTAYMELSSLRSEDTAVYYCARESPGYRYSFDVWDQGTLVTVSSASTKGPSVFPLAPSSKSTSGGTAALGCLVKDYFPEPVTVSWNSGALTSGVHTFPAVLQSSGLYSLSSVVTVPSSSLGTQTYICNVNHKPSNTKVDKRVEPKSCDKTHTCPPCPAPELLGGPSVFLFPPKPKDTLMISRTPEVTCVVVDVSHEDPEVKFNWYVDGVEVHNAKTKPREEQYNSTYRVVSVLTVLHQDWLNGKEYKCKVSNKALPAPIEKTISKAKGQPREPQVYTLPPSREEMTKNQVSLTCLVKGFYPSDIAVEWESNGQPENNYKTTPPVLDSDGSFFLYSKLTVDKSRWQQGNVFSCSVMHEALHNHYTQKSLSLSPGK

SEQ ID NO: 118 - DNA, 1350 bp, Artificial Sequence
  source: /note="Description of Artificial Sequence: Synthetic polynucleotide"
caggtgcaattggtgcagagcggtgccgaagtgaaaaaaccgggcagcagcgtgaaagttagctgcaaagcatccggagggacgtttgactcttacgctgtttcttgggtgcgccaggccccgggccagggcctcgagtggatgggccgtatcgttccgtggctgggccatactcagtacgcccagaaatttcagggccgggtgaccattaccgccgatgaaagcaccagcaccgcctatatggaactgagcagcctgcgcagcgaagatacggccgtgtattattgcgcgcgtgaatctccgggttaccgttactctttcgatgtttgggaccaaggcaccctggtgactgttagctcagcctccaccaagggtccatcggtcttccccctggcaccctcctccaagagcacctctgggggcacagcggccctgggctgcctggtcaaggactacttccccgaaccggtgacggtgtcgtggaactcaggcgccctgaccagcggcgtgcacaccttcccggctgtcctacagtcctcaggactctactccctcagcagcgtggtgaccgtgccctccagcagcttgggcacccagacctacatctgcaacgtgaatcacaagcccagcaacaccaaggtggacaagagagttgagcccaaatcttgtgacaaaactcacacatgcccaccgtgcccagcacctgaactcctggggggaccgtcagtcttcctcttccccccaaaacccaaggacaccctcatgatctcccggacccctgaggtcacatgcgtggtggtggacgtgagccacgaagaccctgaggtcaagttcaactggtacgtggacggcgtggaggtgcataatgccaagacaaagccgcgggaggagcagtacaacagcacgtaccgggtggtcagcgtcctcaccgtcctgcaccaggactggctgaatggcaaggagtacaagtgcaaggtctccaacaaagccctcccagcccccatcgagaaaaccatctccaaagccaaagggcagccccgagaaccacaggtgtacaccctgcccccatcccgggaggagatgaccaagaaccaggtcagcctgacctgcctggtcaaaggcttctatcccagcgacatcgccgtggagtgggagagcaatgggcagccggagaacaactacaagaccacgcctcccgtgctggactccgacggctccttcttcctctacagcaagctcaccgtggacaagagcaggtggcagcaggggaacgtcttctcatgctccgtgatgcatgaggctctgcacaaccactacacgcagaagagcctctccctgtctccgggtaaa

SEQ ID NO: 119 - protein, 11 aa, Artificial Sequence
  source: /note="Description of Artificial Sequence: Synthetic peptide"
SGDAIGEKYVY

SEQ ID NO: 120 - protein, 7 aa, Artificial Sequence
  source: /note="Description of Artificial Sequence: Synthetic peptide"
DDNNRPS

SEQ ID NO: 121 - protein, 11 aa, Artificial Sequence
  source: /note="Description of Artificial Sequence: Synthetic peptide"
ASYDLQQARWV

SEQ ID NO: 122 - protein, 7 aa, Artificial Sequence
  source: /note="Description of Artificial Sequence: Synthetic peptide"
DAIGEKY

SEQ ID NO: 123 - protein, 8 aa, Artificial Sequence
  source: /note="Description of Artificial Sequence: Synthetic peptide"
YDLQQARW

SEQ ID NO: 124 - protein, 6 aa, Artificial Sequence
  source: /note="Description of Artificial Sequence: Synthetic peptide"
AIGEKY

SEQ ID NO: 125 - protein, 108 aa, Artificial Sequence
  source: /note="Description of Artificial Sequence: Synthetic polypeptide"
SYELTQPLSVSVALGQTARITCSGDAIGEKYVYWYQQKPGQAPVLVIYDDNNRPSGIPERFSGSNSGNTATLTISRAQAGDEADYYCASYDLQQARWVFGGGTKLTVL

SEQ ID NO: 126 - DNA, 324 bp, Artificial Sequence
  source: /note="Description of Artificial Sequence: Synthetic polynucleotide"
agctacgaactgacccagccgctgtccgtgagcgtggctctgggccagaccgcgcggattacctgtagcggcgatgctatcggtgaaaaatacgtttactggtaccagcagaaaccgggccaggcgccggtgctggtgatctacgacgacaacaaccgtccgagcggcatcccggaacgttttagcggatccaacagcggcaacaccgcgaccctgaccattagccgcgcccaggcgggagacgaagcggattattactgcgcttcttacgacctgcagcaggctcgttgggtgtttggcggcggcacgaagttaaccgtccta

SEQ ID NO: 127 - protein, 214 aa, Artificial Sequence
  source: /note="Description of Artificial Sequence: Synthetic polypeptide"
SYELTQPLSVSVALGQTARITCSGDAIGEKYVYWYQQKPGQAPVLVIYDDNNRPSGIPERFSGSNSGNTATLTISRAQAGDEADYYCASYDLQQARWVFGGGTKLTVLGQPKAAPSVTLFPPSSEELQANKATLVCLISDFYPGAVTVAWKADSSPVKAGVETTTPSKQSNNKYAASSYLSLTPEQWKSHRSYSCQVTHEGSTVEKTVAPTECS

SEQ ID NO: 128 - DNA, 642 bp, Artificial Sequence
  source: /note="Description of Artificial Sequence: Synthetic polynucleotide"
agctacgaactgacccagccgctgtccgtgagcgtggctctgggccagaccgcgcggattacctgtagcggcgatgctatcggtgaaaaatacgtttactggtaccagcagaaaccgggccaggcgccggtgctggtgatctacgacgacaacaaccgtccgagcggcatcccggaacgttttagcggatccaacagcggcaacaccgcgaccctgaccattagccgcgcccaggcgggagacgaagcggattattactgcgcttcttacgacctgcagcaggctcgttgggtgtttggcggcggcacgaagttaaccgtcctaggtcagcccaaggctgccccctcggtcactctgttcccgccctcctctgaggagcttcaagccaacaaggccacactggtgtgtctcataagtgacttctacccgggagccgtgacagtggcctggaaggcagatagcagccccgtcaaggcgggagtggagaccaccacaccctccaaacaaagcaacaacaagtacgcggccagcagctatctgagcctgacgcctgagcagtggaagtcccacagaagctacagctgccaggtcacgcatgaagggagcaccgtggagaagacagtggcccctacagaatgttca

SEQ ID NO: 129 - protein, 17 aa, Artificial Sequence
  source: /note="Description of Artificial Sequence: Synthetic peptide"
RIVPWLGFTRYAQKFQG

SEQ ID NO: 130 - protein, 6 aa, Artificial Sequence
  source: /note="Description of Artificial Sequence: Synthetic peptide"
VPWLGF

SEQ ID NO: 131 - protein, 8 aa, Artificial Sequence
  source: /note="Description of Artificial Sequence: Synthetic peptide"
IVPWLGFT

SEQ ID NO: 132 - protein, 120 aa, Artificial Sequence
  source: /note="Description of Artificial Sequence: Synthetic polypeptide"
QVQLVQSGAEVKKPGSSVKVSCKASGGTFDSYAVSWVRQAPGQGLEWMGRIVPWLGFTRYAQKFQGRVTITADESTSTAYMELSSLRSEDTAVYYCARESPGYRYSFDVWDQGTLVTVSS

SEQ ID NO: 133 - DNA, 360 bp, Artificial Sequence
  source: /note="Description of Artificial Sequence: Synthetic polynucleotide"
caggtgcaattggtgcagagcggtgccgaagtgaaaaaaccgggcagcagcgtgaaagttagctgcaaagcatccggagggacgtttgactcttacgctgtttcttgggtgcgccaggccccgggccagggcctcgagtggatgggccgtatcgttccgtggctgggcttcactcgttacgcccagaaatttcagggccgggtgaccattaccgccgatgaaagcaccagcaccgcctatatggaactgagcagcctgcgcagcgaagatacggccgtgtattattgcgcgcgtgaatctccgggttaccgttactctttcgatgtttgggaccaaggcaccctggtgactgttagctca

SEQ ID NO: 134 - protein, 450 aa, Artificial Sequence
  source: /note="Description of Artificial Sequence: Synthetic polypeptide"
QVQLVQSGAEVKKPGSSVKVSCKASGGTFDSYAVSWVRQAPGQGLEWMGRIVPWLGFTRYAQKFQGRVTITADESTSTAYMELSSLRSEDTAVYYCARESPGYRYSFDVWDQGTLVTVSSASTKGPSVFPLAPSSKSTSGGTAALGCLVKDYFPEPVTVSWNSGALTSGVHTFPAVLQSSGLYSLSSVVTVPSSSLGTQTYICNVNHKPSNTKVDKRVEPKSCDKTHTCPPCPAPELLGGPSVFLFPPKPKDTLMISRTPEVTCVVVDVSHEDPEVKFNWYVDGVEVHNAKTKPREEQYNSTYRVVSVLTVLHQDWLNGKEYKCKVSNKALPAPIEKTISKAKGQPREPQVYTLPPSREEMTKNQVSLTCLVKGFYPSDIAVEWESNGQPENNYKTTPPVLDSDGSFFLYSKLTVDKSRWQQGNVFSCSVMHEALHNHYTQKSLSLSPGK

SEQ ID NO: 135 - DNA, 1350 bp, Artificial Sequence
  source: /note="Description of Artificial Sequence: Synthetic polynucleotide"
caggtgcaattggtgcagagcggtgccgaagtgaaaaaaccgggcagcagcgtgaaagttagctgcaaagcatccggagggacgtttgactcttacgctgtttcttgggtgcgccaggccccgggccagggcctcgagtggatgggccgtatcgttccgtggctgggcttcactcgttacgcccagaaatttcagggccgggtgaccattaccgccgatgaaagcaccagcaccgcctatatggaactgagcagcctgcgcagcgaagatacggccgtgtattattgcgcgcgtgaatctccgggttaccgttactctttcgatgtttgggaccaaggcaccctggtgactgttagctcagcctccaccaagggtccatcggtcttccccctggcaccctcctccaagagcacctctgggggcacagcggccctgggctgcctggtcaaggactacttccccgaaccggtgacggtgtcgtggaactcaggcgccctgaccagcggcgtgcacaccttcccggctgtcctacagtcctcaggactctactccctcagcagcgtggtgaccgtgccctccagcagcttgggcacccagacctacatctgcaacgtgaatcacaagcccagcaacaccaaggtggacaagagagttgagcccaaatcttgtgacaaaactcacacatgcccaccgtgcccagcacctgaactcctggggggaccgtcagtcttcctcttccccccaaaacccaaggacaccctcatgatctcccggacccctgaggtcacatgcgtggtggtggacgtgagccacgaagaccctgaggtcaagttcaactggtacgtggacggcgtggaggtgcataatgccaagacaaagccgcgggaggagcagtacaacagcacgtaccgggtggtcagcgtcctcaccgtcctgcaccaggactggctgaatggcaaggagtacaagtgcaaggtctccaacaaagccctcccagcccccatcgagaaaaccatctccaaagccaaagggcagccccgagaaccacaggtgtacaccctgcccccatcccgggaggagatgaccaagaaccaggtcagcctgacctgcctggtcaaaggcttctatcccagcgacatcgccgtggagtgggagagcaatgggcagccggagaacaactacaagaccacgcctcccgtgctggactccgacggctccttcttcctctacagcaagctcaccgtggacaagagcaggtggcagcaggggaacgtcttctcatgctccgtgatgcatgaggctctgcacaaccactacacgcagaagagcctctccctgtctccgggtaaa

SEQ ID NO: 136 - protein, 5 aa, Artificial Sequence
  source: /note="Description of Artificial Sequence: Synthetic peptide"
SYAMS

SEQ ID NO: 137 - protein, 17 aa, Artificial Sequence
  source: /note="Description of Artificial Sequence: Synthetic peptide"
VISGSGGSTYYADSVKG

SEQ ID NO: 138 - protein, 15 aa, Artificial Sequence
  source: /note="Description of Artificial Sequence: Synthetic peptide"
GDDYGDDYYYYGMDV

SEQ ID NO: 139 - protein, 7 aa, Artificial Sequence
  source: /note="Description of Artificial Sequence: Synthetic peptide"
GFTFSSY

SEQ ID NO: 140 - protein, 6 aa, Artificial Sequence
  source: /note="Description of Artificial Sequence: Synthetic peptide"
SGSGGS

SEQ ID NO: 141 - protein, 10 aa, Artificial Sequence
  source: /note="Description of Artificial Sequence: Synthetic peptide"
GFTFSSYAMS

SEQ ID NO: 142 - protein, 8 aa, Artificial Sequence
  source: /note="Description of Artificial Sequence: Synthetic peptide"
GFTFSSYA

SEQ ID NO: 143 - protein, 8 aa, Artificial Sequence
  source: /note="Description of Artificial Sequence: Synthetic peptide"
ISGSGGST

SEQ ID NO: 144 - protein, 17 aa, Artificial Sequence
  source: /note="Description of Artificial Sequence: Synthetic peptide"
ARGDDYGDDYYYYGMDV

SEQ ID NO: 145 - protein, 124 aa, Artificial Sequence
  source: /note="Description of Artificial Sequence: Synthetic polypeptide"
EVQLLESGGGLVQSGGSLRLSCAASGFTFSSYAMSWVRQAPGKGLEWVSVISGSGGSTYYADSVKGRFTISRDNSKNTLYLQMNSLRAEDTAVYYCARGDDYGDDYYYYGMDVWGQGTTVTVSS

SEQ ID NO: 146 - DNA, 372 bp, Artificial Sequence
  source: /note="Description of Artificial Sequence: Synthetic polynucleotide"
gaggtgcagctgttggagtctgggggaggcttggtacagtctggggggtccctgagactctcctgtgcagcctctggattcacctttagcagctatgccatgagctgggtccgccaggctccagggaaggggctggagtgggtctcagttattagtggtagtggtggtagcacatactacgcagactccgtgaagggccggttcaccatctccagagacaattccaagaacacgctgtatctgcaaatgaacagcctgagagccgaggacacggccgtatattactgtgcgagaggggatgactacggtgacgactactactactacggtatggacgtctggggccaagggaccacggtcaccgtctcctca

SEQ ID NO: 147 - protein, 454 aa, Artificial Sequence
  source: /note="Description of Artificial Sequence: Synthetic polypeptide"
EVQLLESGGGLVQSGGSLRLSCAASGFTFSSYAMSWVRQAPGKGLEWVSVISGSGGSTYYADSVKGRFTISRDNSKNTLYLQMNSLRAEDTAVYYCARGDDYGDDYYYYGMDVWGQGTTVTVSSASTKGPSVFPLAPSSKSTSGGTAALGCLVKDYFPEPVTVSWNSGALTSGVHTFPAVLQSSGLYSLSSVVTVPSSSLGTQTYICNVNHKPSNTKVDKRVEPKSCDKTHTCPPCPAPELLGGPSVFLFPPKPKDTLMISRTPEVTCVVVDVSHEDPEVKFNWYVDGVEVHNAKTKPREEQYNSTYRVVSVLTVLHQDWLNGKEYKCKVSNKALPAPIEKTISKAKGQPREPQVYTLPPSREEMTKNQVSLTCLVKGFYPSDIAVEWESNGQPENNYKTTPPVLDSDGSFFLYSKLTVDKSRWQQGNVFSCSVMHEALHNHYTQKSLSLSPGK

SEQ ID NO: 148 - DNA, 1362 bp, Artificial Sequence
  source: /note="Description of Artificial Sequence: Synthetic polynucleotide"
gaggtgcagctgttggagtctgggggaggcttggtacagtctggggggtccctgagactctcctgtgcagcctctggattcacctttagcagctatgccatgagctgggtccgccaggctccagggaaggggctggagtgggtctcagttattagtggtagtggtggtagcacatactacgcagactccgtgaagggccggttcaccatctccagagacaattccaagaacacgctgtatctgcaaatgaacagcctgagagccgaggacacggccgtatattactgtgcgagaggggatgactacggtgacgactactactactacggtatggacgtctggggccaagggaccacggtcaccgtctcctcagctagcaccaagggcccaagtgtgtttcccctggcccccagcagcaagtctacttccggcggaactgctgccctgggttgcctggtgaaggactacttccccgagcccgtgacagtgtcctggaactctggggctctgacttccggcgtgcacaccttccccgccgtgctgcagagcagcggcctgtacagcctgagcagcgtggtgacagtgccctccagctctctgggaacccagacctatatctgcaacgtgaaccacaagcccagcaacaccaaggtggacaagagagtggagcccaagagctgcgacaagacccacacctgccccccctgcccagctccagaactgctgggagggccttccgtgttcctgttcccccccaagcccaaggacaccctgatgatcagcaggacccccgaggtgacctgcgtggtggtggacgtgtcccacgaggacccagaggtgaagttcaactggtacgtggacggcgtggaggtgcacaacgccaagaccaagcccagagaggagcagtacaacagcacctacagggtggtgtccgtgctgaccgtgctgcaccaggactggctgaacggcaaagaatacaagtgcaaagtctccaacaaggccctgccagccccaatcgaaaagacaatcagcaaggccaagggccagccacgggagccccaggtgtacaccctgccccccagccgggaggagatgaccaagaaccaggtgtccctgacctgtctggtgaagggcttctaccccagcgatatcgccgtggagtgggagagcaacggccagcccgagaacaactacaagaccacccccccagtgctggacagcgacggcagcttcttcctgtacagcaagctgaccgtggacaagtccaggtggcagcagggcaacgtgttcagctgcagcgtgatgcacgaggccctgcacaaccactacacccagaagtccctgagcctgagccccggcaag

SEQ ID NO: 149 - protein, 16 aa, Artificial Sequence
  source: /note="Description of Artificial Sequence: Synthetic peptide"
RSSQSLLHGNRYNYLD

SEQ ID NO: 150 - protein, 7 aa, Artificial Sequence
  source: /note="Description of Artificial Sequence: Synthetic peptide"
LGSNRAS

SEQ ID NO: 151 - protein, 9 aa, Artificial Sequence
  source: /note="Description of Artificial Sequence: Synthetic peptide"
MQALQTPPT

SEQ ID NO: 152 - protein, 12 aa, Artificial Sequence
  source: /note="Description of Artificial Sequence: Synthetic peptide"
SQSLLHGNRYNY

SEQ ID NO: 153 - protein, 3 aa, Artificial Sequence
  source: /note="Description of Artificial Sequence: Synthetic peptide"
LGS

SEQ ID NO: 154 - protein, 6 aa, Artificial Sequence
  source: /note="Description of Artificial Sequence: Synthetic peptide"
ALQTPP

SEQ ID NO: 155 - protein, 11 aa, Artificial Sequence
  source: /note="Description of Artificial Sequence: Synthetic peptide"
QSLLHGNRYNY

SEQ ID NO: 156 - protein, 112 aa, Artificial Sequence
  source: /note="Description of Artificial Sequence: Synthetic polypeptide"
DIVMTQSPLSLPVTPGEPASISCRSSQSLLHGNRYNYLDWYLQKPGQSPQLLIYLGSNRASGVPDRFSGSGSGTDFTLKISRVEAEDVGVYYCMQALQTPPTFGQGTKVEIK

SEQ ID NO: 157 - DNA, 336 bp, Artificial Sequence
  source: /note="Description of Artificial Sequence: Synthetic polynucleotide"
gatattgtgatgactcagtctccactctccctgcccgtcacccctggagagccggcctccatctcctgcaggtctagtcagagcctcctgcatggtaatcgatacaactatttggattggtacctgcagaagccagggcagtctccacagctcctgatctatttgggttctaatcgggcctccggggtccctgacaggttcagtggcagtggatcaggcacagattttacactgaaaatcagcagagtggaggctgaggatgttggggtttattactgcatgcaagctctacaaactcctccgacgttcggccaagggaccaaggtggaaatcaaa

SEQ ID NO: 158 - protein, 219 aa, Artificial Sequence
  source: /note="Description of Artificial Sequence: Synthetic polypeptide"
DIVMTQSPLSLPVTPGEPASISCRSSQSLLHGNRYNYLDWYLQKPGQSPQLLIYLGSNRASGVPDRFSGSGSGTDFTLKISRVEAEDVGVYYCMQALQTPPTFGQGTKVEIKRTVAAPSVFIFPPSDEQLKSGTASVVCLLNNFYPREAKVQWKVDNALQSGNSQESVTEQDSKDSTYSLSSTLTLSKADYEKHKVYACEVTHQGLSSPVTKSFNRGEC

SEQ ID NO: 159 - DNA, 657 bp, Artificial Sequence
  source: /note="Description of Artificial Sequence: Synthetic polynucleotide"
gatattgtgatgactcagtctccactctccctgcccgtcacccctggagagccggcctccatctcctgcaggtctagtcagagcctcctgcatggtaatcgatacaactatttggattggtacctgcagaagccagggcagtctccacagctcctgatctatttgggttctaatcgggcctccggggtccctgacaggttcagtggcagtggatcaggcacagattttacactgaaaatcagcagagtggaggctgaggatgttggggtttattactgcatgcaagctctacaaactcctccgacgttcggccaagggaccaaggtggaaatcaaacgaactgtggctgcaccaagcgtgttcatcttcccccccagcgacgagcagctgaagagtggcaccgccagcgtggtgtgcctgctgaacaacttctacccccgggaggccaaggtgcagtggaaggtggacaacgccctgcagagcggcaacagccaggagagcgtcaccgagcaggacagcaaggactccacctacagcctgagcagcaccctgaccctgagcaaggccgactacgagaagcataaggtgtacgcctgcgaggtgacccaccagggcctgtccagccccgtgaccaagagcttcaacaggggcgagtgc

SEQ ID NO: 160 - protein, 5 aa, Artificial Sequence
  source: /note="Description of Artificial Sequence: Synthetic peptide"
SCSMN

SEQ ID NO: 161 - protein, 17 aa, Artificial Sequence
  source: /note="Description of Artificial Sequence: Synthetic peptide"
YISSSSSTIYYADSVKG

SEQ ID NO: 162 - protein, 16 aa, Artificial Sequence
  source: /note="Description of Artificial Sequence: Synthetic peptide"
DQGNWNYDDYYNGLDV

SEQ ID NO: 163 - protein, 7 aa, Artificial Sequence
  source: /note="Description of Artificial Sequence: Synthetic peptide"
GFTFNSC

SEQ ID NO: 164 - protein, 6 aa, Artificial Sequence
  source: /note="Description of Artificial Sequence: Synthetic peptide"
SSSSST

SEQ ID NO: 165 - protein, 10 aa, Artificial Sequence
  source: /note="Description of Artificial Sequence: Synthetic peptide"
GFTFNSCSMN

SEQ ID NO: 166 - protein, 8 aa, Artificial Sequence
  source: /note="Description of Artificial Sequence: Synthetic peptide"
GFTFNSCS

SEQ ID NO: 167 - protein, 8 aa, Artificial Sequence
  source: /note="Description of Artificial Sequence: Synthetic peptide"
ISSSSSTI

SEQ ID NO: 168 - protein, 18 aa, Artificial Sequence
  source: /note="Description of Artificial Sequence: Synthetic peptide"
ARDQGNWNYDDYYNGLDV

SEQ ID NO: 169 - protein, 125 aa, Artificial Sequence
  source: /note="Description of Artificial Sequence: Synthetic polypeptide"
EVLLVESGGGLVQPGGSLRLSCAASGFTFNSCSMNWVRQAPGKGLEWVSYISSSSSTIYYADSVKGRFTISRDNAKNSLYLQMNSLKDEDTAVYYCARDQGNWNYDDYYNGLDVWGQGTTVTVSS

SEQ ID NO: 170 - DNA, 375 bp, Artificial Sequence
  source: /note="Description of Artificial Sequence: Synthetic polynucleotide"
gaggtgctgctggtggagtctgggggaggcttggtacagcctggggggtccctgagactctcctgtgcagcctctgggttcaccttcaatagctgtagcatgaactgggtccgccaggctccagggaaggggctggagtgggtttcatacattagtagtagtagtagtaccatttactacgcagactctgtgaagggccgattcaccatctccagagacaatgccaagaactcactgtatctgcaaatgaacagcctgaaagacgaggacacggctgtgtattactgtgcgagagatcagggtaactggaactacgacgactactacaacggtttggacgtctggggccaagggaccacggtcaccgtctcctca

SEQ ID NO: 171 - protein, 455 aa, Artificial Sequence
  source: /note="Description of Artificial Sequence: Synthetic polypeptide"
EVLLVESGGGLVQPGGSLRLSCAASGFTFNSCSMNWVRQAPGKGLEWVSYISSSSSTIYYADSVKGRFTISRDNAKNSLYLQMNSLKDEDTAVYYCARDQGNWNYDDYYNGLDVWGQGTTVTVSSASTKGPSVFPLAPSSKSTSGGTAALGCLVKDYFPEPVTVSWNSGALTSGVHTFPAVLQSSGLYSLSSVVTVPSSSLGTQTYICNVNHKPSNTKVDKRVEPKSCDKTHTCPPCPAPELLGGPSVFLFPPKPKDTLMISRTPEVTCVVVDVSHEDPEVKFNWYVDGVEVHNAKTKPREEQYNSTYRVVSVLTVLHQDWLNGKEYKCKVSNKALPAPIEKTISKAKGQPREPQVYTLPPSREEMTKNQVSLTCLVKGFYPSDIAVEWESNGQPENNYKTTPPVLDSDGSFFLYSKLTVDKSRWQQGNVFSCSVMHEALHNHYTQKSLSLSPGK

SEQ ID NO: 172 - DNA, 1365 bp, Artificial Sequence
  source: /note="Description of Artificial Sequence: Synthetic polynucleotide"
gaggtgctgctggtggagtctgggggaggcttggtacagcctggggggtccctgagactctcctgtgcagcctctgggttcaccttcaatagctgtagcatgaactgggtccgccaggctccagggaaggggctggagtgggtttcatacattagtagtagtagtagtaccatttactacgcagactctgtgaagggccgattcaccatctccagagacaatgccaagaactcactgtatctgcaaatgaacagcctgaaagacgaggacacggctgtgtattactgtgcgagagatcagggtaactggaactacgacgactactacaacggtttggacgtctggggccaagggaccacggtcaccgtctcctcagctagcaccaagggcccaagtgtgtttcccctggcccccagcagcaagtctacttccggcggaactgctgccctgggttgcctggtgaaggactacttccccgagcccgtgacagtgtcctggaactctggggctctgacttccggcgtgcacaccttccccgccgtgctgcagagcagcggcctgtacagcctgagcagcgtggtgacagtgccctccagctctctgggaacccagacctatatctgcaacgtgaaccacaagcccagcaacaccaaggtggacaagagagtggagcccaagagctgcgacaagacccacacctgccccccctgcccagctccagaactgctgggagggccttccgtgttcctgttcccccccaagcccaaggacaccctgatgatcagcaggacccccgaggtgacctgcgtggtggtggacgtgtcccacgaggacccagaggtgaagttcaactggtacgtggacggcgtggaggtgcacaacgccaagaccaagcccagagaggagcagtacaacagcacctacagggtggtgtccgtgctgaccgtgctgcaccaggactggctgaacggcaaagaatacaagtgcaaagtctccaacaaggccctgccagccccaatcgaaaagacaatcagcaaggccaagggccagccacgggagccccaggtgtacaccctgccccccagccgggaggagatgaccaagaaccaggtgtccctgacctgtctggtgaagggcttctaccccagcgatatcgccgtggagtgggagagcaacggccagcccgagaacaactacaagaccacccccccagtgctggacagcgacggcagcttcttcctgtacagcaagctgaccgtggacaagtccaggtggcagcagggcaacgtgttcagctgcagcgtgatgcacgaggccctgcacaaccactacacccagaagtccctgagcctgagccccggcaag

SEQ ID NO: 173 - protein, 16 aa, Artificial Sequence
  source: /note="Description of Artificial Sequence: Synthetic peptide"
RSSQSLLHSNGYNYLD

SEQ ID NO: 174 - protein, 9 aa, Artificial Sequence
  source: /note="Description of Artificial Sequence: Synthetic peptide"
MQALQTPLT

SEQ ID NO: 175 - protein, 12 aa, Artificial Sequence
  source: /note="Description of Artificial Sequence: Synthetic peptide"
SQSLLHSNGYNY

SEQ ID NO: 176 - protein, 6 aa, Artificial Sequence
  source: /note="Description of Artificial Sequence: Synthetic peptide"
ALQTPL

SEQ ID NO: 177 - protein, 11 aa, Artificial Sequence
  source: /note="Description of Artificial Sequence: Synthetic peptide"
QSLLHSNGYNY

SEQ ID NO: 178 - protein, 112 aa, Artificial Sequence
  source: /note="Description of Artificial Sequence: Synthetic polypeptide"
DIVMTQSPLSLPVTPGEPASISCRSSQSLLHSNGYNYLDWYLQKPGQSPQLLIYLGSNRASGVPDRFSGSGSGTDFTLKISRVEAEDVGVYYCMQALQTPLTFGGGTKVEIK

SEQ ID NO: 179 - DNA, 336 bp, Artificial Sequence
  source: /note="Description of Artificial Sequence: Synthetic polynucleotide"
gatattgtgatgactcagtctccactctccctgcccgtcactcctggagagccggcctccatctcctgcaggtctagtcagagcctcctgcatagtaatggatacaactatttggattggtacctgcagaagccagggcagtctccacagctcctgatctatttgggttctaatcgggcctccggggtccctgacaggttcagtggcagtggatcaggcacagattttacactgaaaatcagcagagtggaggctgaggatgttggggtttattactgcatgcaagctctacaaactcctctcactttcggcggagggaccaaggtggagatcaaa

SEQ ID NO: 180 - protein, 219 aa, Artificial Sequence
  source: /note="Description of Artificial Sequence: Synthetic polypeptide"
DIVMTQSPLSLPVTPGEPASISCRSSQSLLHSNGYNYLDWYLQKPGQSPQLLIYLGSNRASGVPDRFSGSGSGTDFTLKISRVEAEDVGVYYCMQALQTPLTFGGGTKVEIKRTVAAPSVFIFPPSDEQLKSGTASVVCLLNNFYPREAKVQWKVDNALQSGNSQESVTEQDSKDSTYSLSSTLTLSKADYEKHKVYACEVTHQGLSSPVTKSFNRGEC

SEQ ID NO: 181 - DNA, 657 bp, Artificial Sequence
  source: /note="Description of Artificial Sequence: Synthetic polynucleotide"
gatattgtgatgactcagtctccactctccctgcccgtcactcctggagagccggcctccatctcctgcaggtctagtcagagcctcctgcatagtaatggatacaactatttggattggtacctgcagaagccagggcagtctccacagctcctgatctatttgggttctaatcgggcctccggggtccctgacaggttcagtggcagtggatcaggcacagattttacactgaaaatcagcagagtggaggctgaggatgttggggtttattactgcatgcaagctctacaaactcctctcactttcggcggagggaccaaggtggagatcaaacgtacggtggccgctcccagcgtgttcatcttcccccccagcgacgagcagctgaagagtggcaccgccagcgtggtgtgcctgctgaacaacttctacccccgggaggccaaggtgcagtggaaggtggacaacgccctgcagagcggcaacagccaggagagcgtcaccgagcaggacagcaaggactccacctacagcctgagcagcaccctgaccctgagcaaggccgactacgagaagcataaggtgtacgcctgcgaggtgacccaccagggcctgtccagccccgtgaccaagagcttcaacaggggcgagtgc

SEQ ID NO: 182 - protein, 5 aa, Artificial Sequence
  source: /note="Description of Artificial Sequence: Synthetic peptide"
HYGMN

SEQ ID NO: 183 - protein, 17 aa, Artificial Sequence
  source: /note="Description of Artificial Sequence: Synthetic peptide"
WINTDTGNPTYADDFKG

SEQ ID NO: 184 - protein, 14 aa, Artificial Sequence
  source: /note="Description of Artificial Sequence: Synthetic peptide"
YGTLYSGYGFFFDS

SEQ ID NO: 185 - protein, 7 aa, Artificial Sequence
  source: /note="Description of Artificial Sequence: Synthetic peptide"
GYTFTHY

SEQ ID NO: 186 - protein, 6 aa, Artificial Sequence
  source: /note="Description of Artificial Sequence: Synthetic peptide"
NTDTGN

SEQ ID NO: 187 - protein, 10 aa, Artificial Sequence
  source: /note="Description of Artificial Sequence: Synthetic peptide"
GYTFTHYGMN

SEQ ID NO: 188 - protein, 8 aa, Artificial Sequence
  source: /note="Description of Artificial Sequence: Synthetic peptide"
GYTFTHYG

SEQ ID NO: 189 - protein, 8 aa, Artificial Sequence
  source: /note="Description of Artificial Sequence: Synthetic peptide"
INTDTGNP

SEQ ID NO: 190 - protein, 16 aa, Artificial Sequence
  source: /note="Description of Artificial Sequence: Synthetic peptide"
VRYGTLYSGYGFFFDS

SEQ ID NO: 191 - protein, 123 aa, Artificial Sequence
  source: /note="Description of Artificial Sequence: Synthetic polypeptide"
QVQLVQSGAELKQPGQSVKISCKASGYTFTHYGMNWVKQAPGQGLKWMGWINTDTGNPTYADDFKGRFVFSLDTSVSTAYLQISNLKNEDTATYYCVRYGTLYSGYGFFFDSWGQGTLVTVSS

SEQ ID NO: 192 - DNA, 369 bp, Artificial Sequence
  source: /note="Description of Artificial Sequence: Synthetic polynucleotide"
caggtccagctggtgcagtcaggagctgagctgaagcagcctggacagtcggtgaagatctcctgcaaggcttcagggtacaccttcacacactatgggatgaactgggtgaagcaggcaccaggacagggtctaaagtggatgggctggatcaacactgacactgggaatccaacatatgctgatgacttcaaaggacggtttgtcttctccttggacacctctgtcagcactgcatatctgcagatcagcaacctcaagaatgaagacacggccacgtattactgtgtgagatatggaaccctatatagcggatatgggtttttttttgattcctggggccaagggaccctggtcaccgtctcctca

SEQ ID NO: 193 - protein, 453 aa, Artificial Sequence
  source: /note="Description of Artificial Sequence: Synthetic polypeptide"
QVQLVQSGAELKQPGQSVKISCKASGYTFTHYGMNWVKQAPGQGLKWMGWINTDTGNPTYADDFKGRFVFSLDTSVSTAYLQISNLKNEDTATYYCVRYGTLYSGYGFFFDSWGQGTLVTVSSAKTTAPSVYPLAPVCGDTTGSSVTLGCLVKGYFPEPVTLTWNSGSLSSGVHTFPAVLQSDLYTLSSSVTVTSSTWPSQSITCNVAHPASSTKVDKKIEPRGPTIKPCPPCKCPAPNLLGGPSVFIFPPKIKDVLMISLSPIVTCVVVDVSEDDPDVQISWFVNNVEVHTAQTQTHREDYNSTLRVVSALPIQHQDWMSGKEFKCKVNNKDLPAPIERTISKPKGSVRAPQVYVLPPPEEEMTKKQVTLTCMVTDFMPEDIYVEWTNNGKTELNYKNTEPVLDSDGSYFMYSKLRVEKKNWVERNSYSCSVVHEGLHNHHTTKSFSRTPGK

SEQ ID NO: 194 - DNA, 1359 bp, Artificial Sequence
  source: /note="Description of Artificial Sequence: Synthetic polynucleotide"
caggtccagctggtgcagtcaggagctgagctgaagcagcctggacagtcggtgaagatctcctgcaaggcttcagggtacaccttcacacactatgggatgaactgggtgaagcaggcaccaggacagggtctaaagtggatgggctggatcaacactgacactgggaatccaacatatgctgatgacttcaaaggacggtttgtcttctccttggacacctctgtcagcactgcatatctgcagatcagcaacctcaagaatgaagacacggccacgtattactgtgtgagatatggaaccctatatagcggatatgggtttttttttgattcctggggccaagggaccctggtcaccgtctcctcagccaagaccaccgcccccagcgtgtaccccctggcccccgtgtgcggcgataccaccggcagcagcgtgaccctgggctgcctggtgaagggctacttccccgagcccgtgaccctgacctggaacagcggctccctgagcagcggcgtgcacaccttccccgccgtgctgcagagcgacctgtacaccctgtccagctccgtgaccgtgacaagcagcacctggcccagccagagcatcacctgcaacgtggcccaccccgccagcagcaccaaggtggacaagaagatcgagcccaggggccccaccatcaagccctgccccccctgcaagtgcccagcccccaacctgctgggcggacccagcgtgttcatcttcccccccaagatcaaggacgtgctgatgatcagcctgagccccatcgtgacctgcgtggtggtggacgtgagcgaggacgaccccgacgtgcagatcagctggttcgtgaacaacgtggaggtgcacaccgcccagacccagacccaccgggaggactacaacagcaccctgcgcgtcgtgtccgccctgcccatccagcaccaggactggatgagcggcaaagaattcaagtgcaaggtgaacaacaaggacctgcctgcccccatcgagcggaccatcagcaagcccaagggcagcgtgagagccccccaggtgtacgtgctgccccctcccgaggaagagatgaccaagaaacaggtgacactgacctgcatggtgaccgacttcatgcccgaggacatctacgtggagtggaccaacaacggcaagaccgagctgaactacaagaacaccgagcctgtgctggacagcgacggcagctacttcatgtacagcaagctgcgggtggagaagaaaaactgggtggagcggaacagctacagctgcagcgtggtgcacgagggcctgcacaaccaccacaccaccaagagcttcagccggacccccggcaag

SEQ ID NO: 195 - protein, 17 aa, Artificial Sequence
  source: /note="Description of Artificial Sequence: Synthetic peptide"
KSSQSLFNSNTNKNYLN

SEQ ID NO: 196 - protein, 7 aa, Artificial Sequence
  source: /note="Description of Artificial Sequence: Synthetic peptide"
YASTRHT

SEQ ID NO: 197 - protein, 9 aa, Artificial Sequence
  source: /note="Description of Artificial Sequence: Synthetic peptide"
QQWYSYPWT

SEQ ID NO: 198 - protein, 13 aa, Artificial Sequence
  source: /note="Description of Artificial Sequence: Synthetic peptide"
SQSLFNSNTNKNY

SEQ ID NO: 199 - protein, 3 aa, Artificial Sequence
  source: /note="Description of Artificial Sequence: Synthetic peptide"
YAS

SEQ ID NO: 200 - protein, 6 aa, Artificial Sequence
  source: /note="Description of Artificial Sequence: Synthetic peptide"
WYSYPW

SEQ ID NO: 201 - protein, 12 aa, Artificial Sequence
  source: /note="Description of Artificial Sequence: Synthetic peptide"
QSLFNSNTNKNY

SEQ ID NO: 202 - protein, 113 aa, Artificial Sequence
  source: /note="Description of Artificial Sequence: Synthetic polypeptide"
DIMMTQSPSSLSVSAGEKATITCKSSQSLFNSNTNKNYLNWYLQKPGQSPKLLFYYASTRHTGVPDRFIGSGSGTDFTLTITSVQDEDLADYYCQQWYSYPWTFGPGTKLEIK

SEQ ID NO: 203 - DNA, 339 bp, Artificial Sequence
  source: /note="Description of Artificial Sequence: Synthetic polynucleotide"
gacatcatgatgacccagtctccatcatccctgagtgtgtcagcaggagagaaagccactatcacctgcaagtccagtcagagtcttttcaacagtaacaccaacaagaactacttgaactggtacctgcagaaaccagggcagtctcctaaactgctgttctattatgcatccactaggcatactggggtccctgatcgcttcataggcagtggatctgggacagatttcactctcaccatcaccagtgtccaggatgaagacctggcagattattactgtcagcagtggtatagctacccgtggacgttcggacctggcaccaagctggaaatcaaa

SEQ ID NO: 204 - protein, 220 aa, Artificial Sequence
  source: /note="Description of Artificial Sequence: Synthetic polypeptide"
DIMMTQSPSSLSVSAGEKATITCKSSQSLFNSNTNKNYLNWYLQKPGQSPKLLFYYASTRHTGVPDRFIGSGSGTDFTLTITSVQDEDLADYYCQQWYSYPWTFGPGTKLEIKRADAAPTVSIFPPSSEQLTSGGASVVCFLNNFYPKDINVKWKIDGSERQNGVLNSWTDQDSKDSTYSMSSTLTLTKDEYERHNSYTCEATHKTSTSPIVKSFNRNEC

SEQ ID NO: 205 - DNA, 660 bp, Artificial Sequence
  source: /note="Description of Artificial Sequence: Synthetic polynucleotide"
gacatcatgatgacccagtctccatcatccctgagtgtgtcagcaggagagaaagccactatcacctgcaagtccagtcagagtcttttcaacagtaacaccaacaagaactacttgaactggtacctgcagaaaccagggcagtctcctaaactgctgttctattatgcatccactaggcatactggggtccctgatcgcttcataggcagtggatctgggacagatttcactctcaccatcaccagtgtccaggatgaagacctggcagattattactgtcagcagtggtatagctacccgtggacgttcggacctggcaccaagctggaaatcaaacgcgctgatgccgcccctaccgtgagcatcttcccccccagcagcgagcagctgaccagcggcggagccagcgtggtgtgcttcctgaacaacttctaccccaaggacatcaacgtgaagtggaagatcgacggcagcgagcggcagaacggcgtgctgaacagctggaccgaccaggacagcaaggactccacctacagcatgagcagcaccctgaccctgaccaaggacgagtacgagcggcacaacagctacacctgcgaggccacccacaagaccagcaccagccccatcgtgaagagcttcaaccggaacgagtgc

SEQ ID NO: 206 - protein, 7 aa, Artificial Sequence
  source: /note="Description of Artificial Sequence: Synthetic peptide"
GYTFWHY

SEQ ID NO: 207 - protein, 10 aa, Artificial Sequence
  source: /note="Description of Artificial Sequence: Synthetic peptide"
GYTFWHYGMN

SEQ ID NO: 208 - protein, 8 aa, Artificial Sequence
  source: /note="Description of Artificial Sequence: Synthetic peptide"
GYTFWHYG

SEQ ID NO: 209 - protein, 123 aa, Artificial Sequence
  source: /note="Description of Artificial Sequence: Synthetic polypeptide"
QVQLVQSGAELKQPGQSVKISCKASGYTFWHYGMNWVKQAPGQGLKWMGWINTDTGNPTYADDFKGRFVFSLDTSVSTAYLQISNLKNEDTATYYCVRYGTLYSGYGFFFDSWGQGTLVTVSS

SEQ ID NO: 210 - DNA, 369 bp, Artificial Sequence
  source: /note="Description of Artificial Sequence: Synthetic polynucleotide"
caggtccagctggtgcagtcaggagctgagctgaagcagcctggacagtcggtgaagatctcctgcaaggcttcagggtacaccttctggcactatgggatgaactgggtgaagcaggcaccaggacagggtctaaagtggatgggctggatcaacactgacactgggaatccaacatatgctgatgacttcaaaggacggtttgtcttctccttggacacctctgtcagcactgcatatctgcagatcagcaacctcaagaatgaagacacggccacgtattactgtgtgagatatggaaccctatatagcggatatgggtttttttttgattcctggggccaagggaccctggtcaccgtctcctca

SEQ ID NO: 211 - protein, 453 aa, Artificial Sequence
  source: /note="Description of Artificial Sequence: Synthetic polypeptide"
QVQLVQSGAELKQPGQSVKISCKASGYTFWHYGMNWVKQAPGQGLKWMGWINTDTGNPTYADDFKGRFVFSLDTSVSTAYLQISNLKNEDTATYYCVRYGTLYSGYGFFFDSWGQGTLVTVSSAKTTAPSVYPLAPVCGDTTGSSVTLGCLVKGYFPEPVTLTWNSGSLSSGVHTFPAVLQSDLYTLSSSVTVTSSTWPSQSITCNVAHPASSTKVDKKIEPRGPTIKPCPPCKCPAPNLLGGPSVFIFPPKIKDVLMISLSPIVTCVVVDVSEDDPDVQISWFVNNVEVHTAQTQTHREDYNSTLRVVSALPIQHQDWMSGKEFKCKVNNKDLPAPIERTISKPKGSVRAPQVYVLPPPEEEMTKKQVTLTCMVTDFMPEDIYVEWTNNGKTELNYKNTEPVLDSDGSYFMYSKLRVEKKNWVERNSYSCSVVHEGLHNHHTTKSFSRTPGK

SEQ ID NO: 212 - DNA, 1359 bp, Artificial Sequence
  source: /note="Description of Artificial Sequence: Synthetic polynucleotide"
caggtccagctggtgcagtcaggagctgagctgaagcagcctggacagtcggtgaagatctcctgcaaggcttcagggtacaccttctggcactatgggatgaactgggtgaagcaggcaccaggacagggtctaaagtggatgggctggatcaacactgacactgggaatccaacatatgctgatgacttcaaaggacggtttgtcttctccttggacacctctgtcagcactgcatatctgcagatcagcaacctcaagaatgaagacacggccacgtattactgtgtgagatatggaaccctatatagcggatatgggtttttttttgattcctggggccaagggaccctggtcaccgtctcctcagccaagaccaccgcccccagcgtgtaccccctggcccccgtgtgcggcgataccaccggcagcagcgtgaccctgggctgcctggtgaagggctacttccccgagcccgtgaccctgacctggaacagcggctccctgagcagcggcgtgcacaccttccccgccgtgctgcagagcgacctgtacaccctgtccagctccgtgaccgtgacaagcagcacctggcccagccagagcatcacctgcaacgtggcccaccccgccagcagcaccaaggtggacaagaagatcgagcccaggggccccaccatcaagccctgccccccctgcaagtgcccagcccccaacctgctgggcggacccagcgtgttcatcttcccccccaagatcaaggacgtgctgatgatcagcctgagccccatcgtgacctgcgtggtggtggacgtgagcgaggacgaccccgacgtgcagatcagctggttcgtgaacaacgtggaggtgcacaccgcccagacccagacccaccgggaggactacaacagcaccctgcgcgtcgtgtccgccctgcccatccagcaccaggactggatgagcggcaaagaattcaagtgcaaggtgaacaacaaggacctgcctgcccccatcgagcggaccatcagcaagcccaagggcagcgtgagagccccccaggtgtacgtgctgccccctcccgaggaagagatgaccaagaaacaggtgacactgacctgcatggtgaccgacttcatgcccgaggacatctacgtggagtggaccaacaacggcaagaccgagctgaactacaagaacaccgagcctgtgctggacagcgacggcagctacttcatgtacagcaagctgcgggtggagaagaaaaactgggtggagcggaacagctacagctgcagcgtggtgcacgagggcctgcacaaccaccacaccaccaagagcttcagccggacccccggcaag

SEQ ID NO: 213 - protein, 7 aa, Artificial Sequence
  source: /note="Description of Artificial Sequence: Synthetic peptide"
GYTFHHY

SEQ ID NO: 214 - protein, 10 aa, Artificial Sequence
  source: /note="Description of Artificial Sequence: Synthetic peptide"
GYTFHHYGMN

SEQ ID NO: 215 - protein, 8 aa, Artificial Sequence
  source: /note="Description of Artificial Sequence: Synthetic peptide"
GYTFHHYG

SEQ ID NO: 216 - protein, 123 aa, Artificial Sequence
  source: /note="Description of Artificial Sequence: Synthetic polypeptide"
QVQLVQSGAELKQPGQSVKISCKASGYTFHHYGMNWVKQAPGQGLKWMGWINTDTGNPTYADDFKGRFVFSLDTSVSTAYLQISNLKNEDTATYYCVRYGTLYSGYGFFFDSWGQGTLVTVSS

SEQ ID NO: 217 - DNA, 369 bp, Artificial Sequence
  source: /note="Description of Artificial Sequence: Synthetic polynucleotide"
caggtccagctggtgcagtcaggagctgagctgaagcagcctggacagtcggtgaagatctcctgcaaggcttcagggtacaccttccaccactatgggatgaactgggtgaagcaggcaccaggacagggtctaaagtggatgggctggatcaacactgacactgggaatccaacatatgctgatgacttcaaaggacggtttgtcttctccttggacacctctgtcagcactgcatatctgcagatcagcaacctcaagaatgaagacacggccacgtattactgtgtgagatatggaaccctatatagcggatatgggtttttttttgattcctggggccaagggaccctggtcaccgtctcctca

SEQ ID NO: 218 - protein, 453 aa, Artificial Sequence
  source: /note="Description of Artificial Sequence: Synthetic polypeptide"
QVQLVQSGAELKQPGQSVKISCKASGYTFHHYGMNWVKQAPGQGLKWMGWINTDTGNPTYADDFKGRFVFSLDTSVSTAYLQISNLKNEDTATYYCVRYGTLYSGYGFFFDSWGQGTLVTVSSAKTTAPSVYPLAPVCGDTTGSSVTLGCLVKGYFPEPVTLTWNSGSLSSGVHTFPAVLQSDLYTLSSSVTVTSSTWPSQSITCNVAHPASSTKVDKKIEPRGPTIKPCPPCKCPAPNLLGGPSVFIFPPKIKDVLMISLSPIVTCVVVDVSEDDPDVQISWFVNNVEVHTAQTQTHREDYNSTLRVVSALPIQHQDWMSGKEFKCKVNNKDLPAPIERTISKPKGSVRAPQVYVLPPPEEEMTKKQVTLTCMVTDFMPEDIYVEWTNNGKTELNYKNTEPVLDSDGSYFMYSKLRVEKKNWVERNSYSCSVVHEGLHNHHTTKSFSRTPGK

SEQ ID NO: 219 - DNA, 1359 bp, Artificial Sequence
  source: /note="Description of Artificial Sequence: Synthetic polynucleotide"
caggtccagctggtgcagtcaggagctgagctgaagcagcctggacagtcggtgaagatctcctgcaaggcttcagggtacaccttccaccactatgggatgaactgggtgaagcaggcaccaggacagggtctaaagtggatgggctggatcaacactgacactgggaatccaacatatgctgatgacttcaaaggacggtttgtcttctccttggacacctctgtcagcactgcatatctgcagatcagcaacctcaagaatgaagacacggccacgtattactgtgtgagatatggaaccctatatagcggatatgggtttttttttgattcctggggccaagggaccctggtcaccgtctcctcagccaagaccaccgcccccagcgtgtaccccctggcccccgtgtgcggcgataccaccggcagcagcgtgaccctgggctgcctggtgaagggctacttccccgagcccgtgaccctgacctggaacagcggctccctgagcagcggcgtgcacaccttccccgccgtgctgcagagcgacctgtacaccctgtccagctccgtgaccgtgacaagcagcacctggcccagccagagcatcacctgcaacgtggcccaccccgccagcagcaccaaggtggacaagaagatcgagcccaggggccccaccatcaagccctgccccccctgcaagtgcccagcccccaacctgctgggcggacccagcgtgttcatcttcccccccaagatcaaggacgtgctgatgatcagcctgagccccatcgtgacctgcgtggtggtggacgtgagcgaggacgaccccgacgtgcagatcagctggttcgtgaacaacgtggaggtgcacaccgcccagacccagacccaccgggaggactacaacagcaccctgcgcgtcgtgtccgccctgcccatccagcaccaggactggatgagcggcaaagaattcaagtgcaaggtgaacaacaaggacctgcctgcccccatcgagcggaccatcagcaagcccaagggcagcgtgagagccccccaggtgtacgtgctgccccctcccgaggaagagatgaccaagaaacaggtgacactgacctgcatggtgaccgacttcatgcccgaggacatctacgtggagtggaccaacaacggcaagaccgagctgaactacaagaacaccgagcctgtgctggacagcgacggcagctacttcatgtacagcaagctgcgggtggagaagaaaaactgggtggagcggaacagctacagctgcagcgtggtgcacgagggcctgcacaaccaccacaccaccaagagcttcagccggacccccggcaag

SEQ ID NO: 220 - protein, 16 aa, Artificial Sequence
  source: /note="Description of Artificial Sequence: Synthetic peptide"
YISYDGDNNYNPSLKN

SEQ ID NO: 221 - protein, 15 aa, Artificial Sequence
  source: /note="Description of Artificial Sequence: Synthetic peptide"
GYYRYGLSYYYVMDY

SEQ ID NO: 222 - protein, 5 aa, Artificial Sequence
  source: /note="Description of Artificial Sequence: Synthetic peptide"
SYDGD

SEQ ID NO: 223 - protein, 7 aa, Artificial Sequence
  source: /note="Description of Artificial Sequence: Synthetic peptide"
ISYDGDN

SEQ ID NO: 224 - protein, 17 aa, Artificial Sequence
  source: /note="Description of Artificial Sequence: Synthetic peptide"
AGGYYRYGLSYYYVMDY

SEQ ID NO: 225 - protein, 124 aa, Artificial Sequence
  source: /note="Description of Artificial Sequence: Synthetic polypeptide"
DIQLQESGPGLVKPSQSLSLTCSVTGYSITSGYYWNWIRQFPGNKLEWMGYISYDGDNNYNPSLKNRISITRDTSKNQFFLKLSSVTTEDTATYYCAGGYYRYGLSYYYVMDYWGQGTSVTVSS

SEQ ID NO: 226 - DNA, 372 bp, Artificial Sequence
  source: /note="Description of Artificial Sequence: Synthetic polynucleotide"
gatatacagcttcaggagtcaggacctggcctcgtgaaaccttctcagtctctgtctctcacctgctctgtcactggctactccatcaccagtggttattactggaactggatccggcagtttccaggaaacaaactggaatggatgggctacataagctacgacggtgacaataactacaacccatctctcaaaaatcgaatctccatcactcgtgacacatctaagaaccagtttttcctgaagttgagttctgtgactactgaggacacagctacatattactgtgcaggaggctactataggtacggcctgtcgtattactatgttatggactactggggtcaaggaacctcagtcaccgtctcctca

SEQ ID NO: 227 - protein, 454 aa, Artificial Sequence
  source: /note="Description of Artificial Sequence: Synthetic polypeptide"
DIQLQESGPGLVKPSQSLSLTCSVTGYSITSGYYWNWIRQFPGNKLEWMGYISYDGDNNYNPSLKNRISITRDTSKNQFFLKLSSVTTEDTATYYCAGGYYRYGLSYYYVMDYWGQGTSVTVSSASTKGPSVFPLAPSSKSTSGGTAALGCLVKDYFPEPVTVSWNSGALTSGVHTFPAVLQSSGLYSLSSVVTVPSSSLGTQTYICNVNHKPSNTKVDKRVEPKSCDKTHTCPPCPAPELLGGPSVFLFPPKPKDTLMISRTPEVTCVVVDVSHEDPEVKFNWYVDGVEVHNAKTKPREEQYNSTYRVVSVLTVLHQDWLNGKEYKCKVSNKALPAPIEKTISKAKGQPREPQVYTLPPSREEMTKNQVSLTCLVKGFYPSDIAVEWESNGQPENNYKTTPPVLDSDGSFFLYSKLTVDKSRWQQGNVFSCSVMHEALHNHYTQKSLSLSPGK

SEQ ID NO: 228 - DNA, 1362 bp, Artificial Sequence
  source: /note="Description of Artificial Sequence: Synthetic polynucleotide"
gatatacagcttcaggagtcaggacctggcctcgtgaaaccttctcagtctctgtctctcacctgctctgtcactggctactccatcaccagtggttattactggaactggatccggcagtttccaggaaacaaactggaatggatgggctacataagctacgacggtgacaataactacaacccatctctcaaaaatcgaatctccatcactcgtgacacatctaagaaccagtttttcctgaagttgagttctgtgactactgaggacacagctacatattactgtgcaggaggctactataggtacggcctgtcgtattactatgttatggactactggggtcaaggaacctcagtcaccgtctcctcagctagcaccaagggcccaagtgtgtttcccctggcccccagcagcaagtctacttccggcggaactgctgccctgggttgcctggtgaaggactacttccccgagcccgtgacagtgtcctggaactctggggctctgacttccggcgtgcacaccttccccgccgtgctgcagagcagcggcctgtacagcctgagcagcgtggtgacagtgccctccagctctctgggaacccagacctatatctgcaacgtgaaccacaagcccagcaacaccaaggtggacaagagagtggagcccaagagctgcgacaagacccacacctgccccccctgcccagctccagaactgctgggagggccttccgtgttcctgttcccccccaagcccaaggacaccctgatgatcagcaggacccccgaggtgacctgcgtggtggtggacgtgtcccacgaggacccagaggtgaagttcaactggtacgtggacggcgtggaggtgcacaacgccaagaccaagcccagagaggagcagtacaacagcacctacagggtggtgtccgtgctgaccgtgctgcaccaggactggctgaacggcaaagaatacaagtgcaaagtctccaacaaggccctgccagccccaatcgaaaagacaatcagcaaggccaagggccagccacgggagccccaggtgtacaccctgccccccagccgggaggagatgaccaagaaccaggtgtccctgacctgtctggtgaagggcttctaccccagcgatatcgccgtggagtgggagagcaacggccagcccgagaacaactacaagaccacccccccagtgctggacagcgacggcagcttcttcctgtacagcaagctgaccgtggacaagtccaggtggcagcagggcaacgtgttcagctgcagcgtgatgcacgaggccctgcacaaccactacacccagaagtccctgagcctgagccccggcaag

SEQ ID NO: 229 - protein, 111 aa, Artificial Sequence
  source: /note="Description of Artificial Sequence: Synthetic polypeptide"
DTVLTQSPASLAVSLGQRATISCKASQSVDYDGNSYMNWYQQKPGQPPKLLIYAASNLESGIPARFSGSGSGTDFTLNIHPVEEEDAATYYCQQSNEDPPTFGGGTKLEIK

SEQ ID NO: 230 - DNA, 333 bp, Artificial Sequence
  source: /note="Description of Artificial Sequence: Synthetic polynucleotide"
gacactgtgctgacccaatctccagcctctttggctgtgtctctagggcagagggccaccatctcctgcaaggccagccaaagtgttgattatgatggtaatagttatatgaactggtaccaacagaaaccaggacagccacccaaactcctcatctatgctgcatccaatctagaatctgggatcccagccaggtttagtggcagtgggtctgggacagacttcaccctcaacatccatcctgtggaggaggaggatgctgcaacctattactgtcagcaaagtaatgaggatcctccgacgttcggtggaggcaccaagctggaaatcaaa

SEQ ID NO: 231 - protein, 218 aa, Artificial Sequence
  source: /note="Description of Artificial Sequence: Synthetic polypeptide"
DTVLTQSPASLAVSLGQRATISCKASQSVDYDGNSYMNWYQQKPGQPPKLLIYAASNLESGIPARFSGSGSGTDFTLNIHPVEEEDAATYYCQQSNEDPPTFGGGTKLEIKRTVAAPSVFIFPPSDEQLKSGTASVVCLLNNFYPREAKVQWKVDNALQSGNSQESVTEQDSKDSTYSLSSTLTLSKADYEKHKVYACEVTHQGLSSPVTKSFNRGEC

SEQ ID NO: 232 - DNA, 654 bp, Artificial Sequence
  source: /note="Description of Artificial Sequence: Synthetic polynucleotide"
gacactgtgctgacccaatctccagcctctttggctgtgtctctagggcagagggccaccatctcctgcaaggccagccaaagtgttgattatgatggtaatagttatatgaactggtaccaacagaaaccaggacagccacccaaactcctcatctatgctgcatccaatctagaatctgggatcccagccaggtttagtggcagtgggtctgggacagacttcaccctcaacatccatcctgtggaggaggaggatgctgcaacctattactgtcagcaaagtaatgaggatcctccgacgttcggtggaggcaccaagctggaaatcaaacgtacggtggccgctcccagcgtgttcatcttcccccccagcgacgagcagctgaagagtggcaccgccagcgtggtgtgcctgctgaacaacttctacccccgggaggccaaggtgcagtggaaggtggacaacgccctgcagagcggcaacagccaggagagcgtcaccgagcaggacagcaaggactccacctacagcctgagcagcaccctgaccctgagcaaggccgactacgagaagcataaggtgtacgcctgcgaggtgacccaccagggcctgtccagccccgtgaccaagagcttcaacaggggcgagtgc

SEQ ID NO: 233 - protein, 125 aa, Artificial Sequence
  source: /note="Description of Artificial Sequence: Synthetic polypeptide"
EVQLQQFGAELVKPGASVKISCKASGYTFTDYNMDWVKQSHGKSLEWIGDINPKYDISTYNQQFKGKATLTVDKSSSTAYMELRSLTSEDTAVYYCARRGFFLYYGINYYYFDVWGAGTTVTVSS

SEQ ID NO: 234 - DNA, 375 bp, Artificial Sequence
  source: /note="Description of Artificial Sequence: Synthetic polynucleotide"
gaggtccaactgcaacagtttggagctgaactggtgaagcctggggcttcagtgaagatatcctgcaaggcttctggctacacattcactgactacaacatggactgggtgaagcagagccatggaaagagccttgagtggattggagatattaatcctaagtatgatatttctacctacaatcagcaattcaagggaaaggccacattgactgtagacaagtcctccagcacagcctacatggagctccgcagcctgacatctgaggacactgcagtctattattgtgcaagaagaggcttttttctttactacggtattaactactattacttcgatgtctggggcgcagggaccacggtcaccgtctcctca

SEQ ID NO: 235 - protein, 455 aa, Artificial Sequence
  source: /note="Description of Artificial Sequence: Synthetic polypeptide"
EVQLQQFGAELVKPGASVKISCKASGYTFTDYNMDWVKQSHGKSLEWIGDINPKYDISTYNQQFKGKATLTVDKSSSTAYMELRSLTSEDTAVYYCARRGFFLYYGINYYYFDVWGAGTTVTVSSASTKGPSVFPLAPSSKSTSGGTAALGCLVKDYFPEPVTVSWNSGALTSGVHTFPAVLQSSGLYSLSSVVTVPSSSLGTQTYICNVNHKPSNTKVDKRVEPKSCDKTHTCPPCPAPELLGGPSVFLFPPKPKDTLMISRTPEVTCVVVDVSHEDPEVKFNWYVDGVEVHNAKTKPREEQYNSTYRVVSVLTVLHQDWLNGKEYKCKVSNKALPAPIEKTISKAKGQPREPQVYTLPPSREEMTKNQVSLTCLVKGFYPSDIAVEWESNGQPENNYKTTPPVLDSDGSFFLYSKLTVDKSRWQQGNVFSCSVMHEALHNHYTQKSLSLSPGK

SEQ ID NO: 236 - DNA, 1365 bp, Artificial Sequence
  source: /note="Description of Artificial Sequence: Synthetic polynucleotide"
gaggtccaactgcaacagtttggagctgaactggtgaagcctggggcttcagtgaagatatcctgcaaggcttctggctacacattcactgactacaacatggactgggtgaagcagagccatggaaagagccttgagtggattggagatattaatcctaagtatgatatttctacctacaatcagcaattcaagggaaaggccacattgactgtagacaagtcctccagcacagcctacatggagctccgcagcctgacatctgaggacactgcagtctattattgtgcaagaagaggcttttttctttactacggtattaactactattacttcgatgtctggggcgcagggaccacggtcaccgtctcctcagctagcaccaagggcccaagtgtgtttcccctggcccccagcagcaagtctacttccggcggaactgctgccctgggttgcctggtgaaggactacttccccgagcccgtgacagtgtcctggaactctggggctctgacttccggcgtgcacaccttccccgccgtgctgcagagcagcggcctgtacagcctgagcagcgtggtgacagtgccctccagctctctgggaacccagacctatatctgcaacgtgaaccacaagcccagcaacaccaaggtggacaagagagtggagcccaagagctgcgacaagacccacacctgccccccctgcccagctccagaactgctgggagggccttccgtgttcctgttcccccccaagcccaaggacaccctgatgatcagcaggacccccgaggtgacctgcgtggtggtggacgtgtcccacgaggacccagaggtgaagttcaactggtacgtggacggcgtggaggtgcacaacgccaagaccaagcccagagaggagcagtacaacagcacctacagggtggtgtccgtgctgaccgtgctgcaccaggactggctgaacggcaaagaatacaagtgcaaagtctccaacaaggccctgccagccccaatcgaaaagacaatcagcaaggccaagggccagccacgggagccccaggtgtacaccctgccccccagccgggaggagatgaccaagaaccaggtgtccctgacctgtctggtgaagggcttctaccccagcgatatcgccgtggagtgggagagcaacggccagcccgagaacaactacaagaccacccccccagtgctggacagcgacggcagcttcttcctgtacagcaagctgaccgtggacaagtccaggtggcagcagggcaacgtgttcagctgcagcgtgatgcacgaggccctgcacaaccactacacccagaagtccctgagcctgagccccggcaag

SEQ ID NO: 237 - protein, 106 aa, Artificial Sequence
  source: /note="Description of Artificial Sequence: Synthetic polypeptide"
QIVLTQSPAIMSASLGEEITLTCSASSSVSYIHWYQQKSGTSPTLLIYSTSNLASGVPSRFSGSGSGTFYSLTISSVEAEDAADYYCHQWSSYPWTFGGGTKLEIK

SEQ ID NO: 238 - DNA, 318 bp, Artificial Sequence
  source: /note="Description of Artificial Sequence: Synthetic polynucleotide"
caaattgttctcacccagtctccagcaatcatgtctgcatctctaggggaggagatcaccctaacctgcagtgccagctcgagtgtaagttacatacactggtaccagcagaagtcaggcacttctcccacactcttgatttatagcacatccaatctggcttctggagtcccttctcgcttcagtggcagtgggtctgggaccttttattctctcacaatcagcagtgtggaggctgaagatgctgccgattattactgccatcagtggagtagttatccatggacgttcggtggaggcaccaagctggaaatcaaa

SEQ ID NO: 239 - protein, 213 aa, Artificial Sequence
  source: /note="Description of Artificial Sequence: Synthetic polypeptide"
QIVLTQSPAIMSASLGEEITLTCSASSSVSYIHWYQQKSGTSPTLLIYSTSNLASGVPSRFSGSGSGTFYSLTISSVEAEDAADYYCHQWSSYPWTFGGGTKLEIKRTVAAPSVFIFPPSDEQLKSGTASVVCLLNNFYPREAKVQWKVDNALQSGNSQESVTEQDSKDSTYSLSSTLTLSKADYEKHKVYACEVTHQGLSSPVTKSFNRGEC

SEQ ID NO: 240 - DNA, 639 bp, Artificial Sequence
  source: /note="Description of Artificial Sequence: Synthetic polynucleotide"
caaattgttctcacccagtctccagcaatcatgtctgcatctctaggggaggagatcaccctaacctgcagtgccagctcgagtgtaagttacatacactggtaccagcagaagtcaggcacttctcccacactcttgatttatagcacatccaatctggcttctggagtcccttctcgcttcagtggcagtgggtctgggaccttttattctctcacaatcagcagtgtggaggctgaagatgctgccgattattactgccatcagtggagtagttatccatggacgttcggtggaggcaccaagctggaaatcaaacgtacggtggccgctcccagcgtgttcatcttcccccccagcgacgagcagctgaagagtggcaccgccagcgtggtgtgcctgctgaacaacttctacccccgggaggccaaggtgcagtggaaggtggacaacgccctgcagagcggcaacagccaggagagcgtcaccgagcaggacagcaaggactccacctacagcctgagcagcaccctgaccctgagcaaggccgactacgagaagcataaggtgtacgcctgcgaggtgacccaccagggcctgtccagccccgtgaccaagagcttcaacaggggcgagtgc

SEQ ID NO: 241 - protein, 129 aa, Artificial Sequence
  source: /note="Description of Artificial Sequence: Synthetic polypeptide"
DIQLQESGPGLVKPSQSLSLTCSVTGYSITSGYYWNWIRQFPGNKLEWMGYISYDGDNNYNPSLKNRISITRDTSKNQFFLKLSSVTTEDTATYYCAGGYYRYGLGSYSGSYYYVMDYWGQGTSVTVSS

SEQ ID NO: 242 - DNA, 387 bp, Artificial Sequence
  source: /note="Description of Artificial Sequence: Synthetic polynucleotide"
gatatacagcttcaggagtcaggacctggcctcgtgaaaccttctcagtctctgtctctcacctgctctgtcactggctactccatcaccagtggttattactggaactggatccggcagtttccaggaaacaaactggaatggatgggctacataagctacgacggtgacaataactacaacccatctctcaaaaatcgaatctccatcactcgtgacacatctaagaaccagtttttcctgaagttgagttctgtgactactgaggacacagctacatattactgtgcaggaggctactataggtacggcctgggctcctactccggctcgtattactatgttatggactactggggtcaaggaacctcagtcaccgtctcctca

SEQ ID NO: 243 - protein, 459 aa, Artificial Sequence
  source: /note="Description of Artificial Sequence: Synthetic polypeptide"
DIQLQESGPGLVKPSQSLSLTCSVTGYSITSGYYWNWIRQFPGNKLEWMGYISYDGDNNYNPSLKNRISITRDTSKNQFFLKLSSVTTEDTATYYCAGGYYRYGLGSYSGSYYYVMDYWGQGTSVTVSSASTKGPSVFPLAPSSKSTSGGTAALGCLVKDYFPEPVTVSWNSGALTSGVHTFPAVLQSSGLYSLSSVVTVPSSSLGTQTYICNVNHKPSNTKVDKRVEPKSCDKTHTCPPCPAPELLGGPSVFLFPPKPKDTLMISRTPEVTCVVVDVSHEDPEVKFNWYVDGVEVHNAKTKPREEQYNSTYRVVSVLTVLHQDWLNGKEYKCKVSNKALPAPIEKTISKAKGQPREPQVYTLPPSREEMTKNQVSLTCLVKGFYPSDIAVEWESNGQPENNYKTTPPVLDSDGSFFLYSKLTVDKSRWQQGNVFSCSVMHEALHNHYTQKSLSLSPGK

SEQ ID NO: 244 - DNA, 1377 bp, Artificial Sequence
  source: /note="Description of Artificial Sequence: Synthetic polynucleotide"
gatatacagcttcaggagtcaggacctggcctcgtgaaaccttctcagtctctgtctctcacctgctctgtcactggctactccatcaccagtggttattactggaactggatccggcagtttccaggaaacaaactggaatggatgggctacataagctacgacggtgacaataactacaacccatctctcaaaaatcgaatctccatcactcgtgacacatctaagaaccagtttttcctgaagttgagttctgtgactactgaggacacagctacatattactgtgcaggaggctactataggtacggcctgggctcctactccggctcgtattactatgttatggactactggggtcaaggaacctcagtcaccgtctcctcagctagcaccaagggcccaagtgtgtttcccctggcccccagcagcaagtctacttccggcggaactgctgccctgggttgcctggtgaaggactacttccccgagcccgtgacagtgtcctggaactctggggctctgacttccggcgtgcacaccttccccgccgtgctgcagagcagcggcctgtacagcctgagcagcgtggtgacagtgccctccagctctctgggaacccagacctatatctgcaacgtgaaccacaagcccagcaacaccaaggtggacaagagagtggagcccaagagctgcgacaagacccacacctgccccccctgcccagctccagaactgctgggagggccttccgtgttcctgttcccccccaagcccaaggacaccctgatgatcagcaggacccccgaggtgacctgcgtggtggtggacgtgtcccacgaggacccagaggtgaagttcaactggtacgtggacggcgtggaggtgcacaacgccaagaccaagcccagagaggagcagtacaacagcacctacagggtggtgtccgtgctgaccgtgctgcaccaggactggctgaacggcaaagaatacaagtgcaaagtctccaacaaggccctgccagccccaatcgaaaagacaatcagcaaggccaagggccagccacgggagccccaggtgtacaccctgccccccagccgggaggagatgaccaagaaccaggtgtccctgacctgtctggtgaagggcttctaccccagcgatatcgccgtggagtgggagagcaacggccagcccgagaacaactacaagaccacccccccagtgctggacagcgacggcagcttcttcctgtacagcaagctgaccgtggacaagtccaggtggcagcagggcaacgtgttcagctgcagcgtgatgcacgaggccctgcacaaccactacacccagaagtccctgagcctgagccccggcaag

SEQ ID NO: 245 - protein, 17 aa, Artificial Sequence
  source: /note="Description of Artificial Sequence: Synthetic peptide"
DINPNYDITTYNQRFKG

SEQ ID NO: 246 - protein, 16 aa, Artificial Sequence
  source: /note="Description of Artificial Sequence: Synthetic peptide"
RGFFPYYGNSYYYFDV

SEQ ID NO: 247 - protein, 6 aa, Artificial Sequence
  source: /note="Description of Artificial Sequence: Synthetic peptide"
NPNYDI

SEQ ID NO: 248 - protein, 8 aa, Artificial Sequence
  source: /note="Description of Artificial Sequence: Synthetic peptide"
INPNYDIT

SEQ ID NO: 249 - protein, 18 aa, Artificial Sequence
  source: /note="Description of Artificial Sequence: Synthetic peptide"
ARRGFFPYYGNSYYYFDV

SEQ ID NO: 250 - protein, 125 aa, Artificial Sequence
  source: /note="Description of Artificial Sequence: Synthetic polypeptide"
EVQLQQFGAELVKPGTSVKISCKASGYTFTDYNMDWVKQSHGKSLEWIGDINPNYDITTYNQRFKGKATLTVDKSSSTAYMELRSLTSEDTAVYYCARRGFFPYYGNSYYYFDVWGAGTTVTVSS

SEQ ID NO: 251 - DNA, 375 bp, Artificial Sequence
  source: /note="Description of Artificial Sequence: Synthetic polynucleotide"
gaggtccagctgcaacagtttggagctgagctggtgaagcctgggacttcagtgaagatatcctgcaaggcttctggctacacattcactgactacaacatggactgggtgaagcagagccatggaaagagccttgagtggattggagatattaatcctaactatgatattactacctacaaccagaggttcaagggaaaggccacattgactgtagacaagtcctccagcacagcctacatggagctccgcagcctgacatctgaggacactgcagtctattactgtgcaagaagaggattttttccttattacggtaatagctactattacttcgatgtctggggcgcagggaccacggtcaccgtctcctca

SEQ ID NO: 252 - protein, 455 aa, Artificial Sequence
  source: /note="Description of Artificial Sequence: Synthetic polypeptide"
EVQLQQFGAELVKPGTSVKISCKASGYTFTDYNMDWVKQSHGKSLEWIGDINPNYDITTYNQRFKGKATLTVDKSSSTAYMELRSLTSEDTAVYYCARRGFFPYYGNSYYYFDVWGAGTTVTVSSASTKGPSVFPLAPSSKSTSGGTAALGCLVKDYFPEPVTVSWNSGALTSGVHTFPAVLQSSGLYSLSSVVTVPSSSLGTQTYICNVNHKPSNTKVDKRVEPKSCDKTHTCPPCPAPELLGGPSVFLFPPKPKDTLMISRTPEVTCVVVDVSHEDPEVKFNWYVDGVEVHNAKTKPREEQYNSTYRVVSVLTVLHQDWLNGKEYKCKVSNKALPAPIEKTISKAKGQPREPQVYTLPPSREEMTKNQVSLTCLVKGFYPSDIAVEWESNGQPENNYKTTPPVLDSDGSFFLYSKLTVDKSRWQQGNVFSCSVMHEALHNHYTQKSLSLSPGK

SEQ ID NO: 253 - DNA, 1365 bp, Artificial Sequence
  source: /note="Description of Artificial Sequence: Synthetic polynucleotide"
gaggtccagctgcaacagtttggagctgagctggtgaagcctgggacttcagtgaagatatcctgcaaggcttctggctacacattcactgactacaacatggactgggtgaagcagagccatggaaagagccttgagtggattggagatattaatcctaactatgatattactacctacaaccagaggttcaagggaaaggccacattgactgtagacaagtcctccagcacagcctacatggagctccgcagcctgacatctgaggacactgcagtctattactgtgcaagaagaggattttttccttattacggtaatagctactattacttcgatgtctggggcgcagggaccacggtcaccgtctcctcagctagcaccaagggcccaagtgtgtttcccctggcccccagcagcaagtctacttccggcggaactgctgccctgggttgcctggtgaaggactacttccccgagcccgtgacagtgtcctggaactctggggctctgacttccggcgtgcacaccttccccgccgtgctgcagagcagcggcctgtacagcctgagcagcgtggtgacagtgccctccagctctctgggaacccagacctatatctgcaacgtgaaccacaagcccagcaacaccaaggtggacaagagagtggagcccaagagctgcgacaagacccacacctgccccccctgcccagctccagaactgctgggagggccttccgtgttcctgttcccccccaagcccaaggacaccctgatgatcagcaggacccccgaggtgacctgcgtggtggtggacgtgtcccacgaggacccagaggtgaagttcaactggtacgtggacggcgtggaggtgcacaacgccaagaccaagcccagagaggagcagtacaacagcacctacagggtggtgtccgtgctgaccgtgctgcaccaggactggctgaacggcaaagaatacaagtgcaaagtctccaacaaggccctgccagccccaatcgaaaagacaatcagcaaggccaagggccagccacgggagccccaggtgtacaccctgccccccagccgggaggagatgaccaagaaccaggtgtccctgacctgtctggtgaagggcttctaccccagcgatatcgccgtggagtgggagagcaacggccagcccgagaacaactacaagaccacccccccagtgctggacagcgacggcagcttcttcctgtacagcaagctgaccgtggacaagtccaggtggcagcagggcaacgtgttcagctgcagcgtgatgcacgaggccctgcacaaccactacacccagaagtccctgagcctgagccccggcaag

SEQ ID NO: 254 - protein, 10 aa, Artificial Sequence
  source: /note="Description of Artificial Sequence: Synthetic peptide"
SASSSVSYMH

SEQ ID NO: 255 - protein, 9 aa, Artificial Sequence
  source: /note="Description of Artificial Sequence: Synthetic peptide"
HQWSNYPWT

SEQ ID NO: 256 - protein, 6 aa, Artificial Sequence
  source: /note="Description of Artificial Sequence: Synthetic peptide"
WSNYPW

SEQ ID NO: 257 - protein, 106 aa, Artificial Sequence
  source: /note="Description of Artificial Sequence: Synthetic polypeptide"
QIVLTQSPTIMSASLGEEITLTCSASSSVSYMHWYQQKSGTSPKLLIYSTSNLASGVPSRFSGSGSGTFYSLTISSVEAEDAADYYCHQWSNYPWTFGGGTKLEIK

SEQ ID NO: 258 - DNA, 318 bp, Artificial Sequence
  source: /note="Description of Artificial Sequence: Synthetic polynucleotide"
caaattgttctcacccagtctccaacaatcatgtctgcatctctaggggaggagatcacccttacctgcagtgccagctcgagtgtaagttacatgcactggtaccagcagaagtcaggcacttctcccaaactcttgatttatagcacatccaacctggcttctggagtcccttctcgcttcagtggcagtgggtctgggaccttttattctctcacaatcagcagtgtggaggctgaagatgctgccgattattactgccatcagtggagtaattatccatggacgttcggtggaggcaccaagctggaaatcaaa

SEQ ID NO: 259 - protein, 213 aa, Artificial Sequence
  source: /note="Description of Artificial Sequence: Synthetic polypeptide"
QIVLTQSPTIMSASLGEEITLTCSASSSVSYMHWYQQKSGTSPKLLIYSTSNLASGVPSRFSGSGSGTFYSLTISSVEAEDAADYYCHQWSNYPWTFGGGTKLEIKRTVAAPSVFIFPPSDEQLKSGTASVVCLLNNFYPREAKVQWKVDNALQSGNSQESVTEQDSKDSTYSLSSTLTLSKADYEKHKVYACEVTHQGLSSPVTKSFNRGEC

SEQ ID NO: 260 - DNA, 639 bp, Artificial Sequence
  source: /note="Description of Artificial Sequence: Synthetic polynucleotide"
caaattgttctcacccagtctccaacaatcatgtctgcatctctaggggaggagatcacccttacctgcagtgccagctcgagtgtaagttacatgcactggtaccagcagaagtcaggcacttctcccaaactcttgatttatagcacatccaacctggcttctggagtcccttctcgcttcagtggcagtgggtctgggaccttttattctctcacaatcagcagtgtggaggctgaagatgctgccgattattactgccatcagtggagtaattatccatggacgttcggtggaggcaccaagctggaaatcaaacgtacggtggccgctcccagcgtgttcatcttcccccccagcgacgagcagctgaagagtggcaccgccagcgtggtgtgcctgctgaacaacttctacccccgggaggccaaggtgcagtggaaggtggacaacgccctgcagagcggcaacagccaggagagcgtcaccgagcaggacagcaaggactccacctacagcctgagcagcaccctgaccctgagcaaggccgactacgagaagcataaggtgtacgcctgcgaggtgacccaccagggcctgtccagccccgtgaccaagagcttcaacaggggcgagtgc

SEQ ID NO: 261 - protein, 17 aa, Artificial Sequence
  source: /note="Description of Artificial Sequence: Synthetic peptide"
DINPNYDITSYNQKFKG

SEQ ID NO: 262 - protein, 16 aa, Artificial Sequence
  source: /note="Description of Artificial Sequence: Synthetic peptide"
RGFFLYYGSSYYYFDV

SEQ ID NO: 263 - protein, 18 aa, Artificial Sequence
  source: /note="Description of Artificial Sequence: Synthetic peptide"
ARRGFFLYYGSSYYYFDV

SEQ ID NO: 264 - protein, 125 aa, Artificial Sequence
  source: /note="Description of Artificial Sequence: Synthetic polypeptide"
EVQLQQFGAELVKPGASVKISCKASGYTFTDYNMDWVKQSHGKSLEWIGDINPNYDITSYNQKFKGKATLTVDKSSSTAYMELRSLTSEDTAVYYCARRGFFLYYGSSYYYFDVWGAGTTVTVSS

SEQ ID NO: 265 - DNA, 375 bp, Artificial Sequence
  source: /note="Description of Artificial Sequence: Synthetic polynucleotide"
gaggtccagctgcaacagtttggagctgagctggtgaagcctggggcttcagtgaagatatcctgcaaggcttctggctacacattcactgactacaacatggactgggtgaagcagagccatggaaagagccttgagtggattggagatattaatcctaactatgatattactagctacaaccagaagttcaagggaaaggccacattgactgtagacaagtcctccagcacagcctacatggagctccgcagcctgacatctgaggacactgcagtctattactgtgcaagaagagggttttttctttactacggtagtagctactattacttcgatgtctggggcgcagggaccacggtcaccgtctcctca

SEQ ID NO: 266 - protein, 455 aa, Artificial Sequence
  source: /note="Description of Artificial Sequence: Synthetic polypeptide"
EVQLQQFGAELVKPGASVKISCKASGYTFTDYNMDWVKQSHGKSLEWIGDINPNYDITSYNQKFKGKATLTVDKSSSTAYMELRSLTSEDTAVYYCARRGFFLYYGSSYYYFDVWGAGTTVTVSSASTKGPSVFPLAPSSKSTSGGTAALGCLVKDYFPEPVTVSWNSGALTSGVHTFPAVLQSSGLYSLSSVVTVPSSSLGTQTYICNVNHKPSNTKVDKRVEPKSCDKTHTCPPCPAPELLGGPSVFLFPPKPKDTLMISRTPEVTCVVVDVSHEDPEVKFNWYVDGVEVHNAKTKPREEQYNSTYRVVSVLTVLHQDWLNGKEYKCKVSNKALPAPIEKTISKAKGQPREPQVYTLPPSREEMTKNQVSLTCLVKGFYPSDIAVEWESNGQPENNYKTTPPVLDSDGSFFLYSKLTVDKSRWQQGNVFSCSVMHEALHNHYTQKSLSLSPGK

SEQ ID NO: 267 - DNA, 1365 bp, Artificial Sequence
  source: /note="Description of Artificial Sequence: Synthetic polynucleotide"
gaggtccagctgcaacagtttggagctgagctggtgaagcctggggcttcagtgaagatatcctgcaaggcttctggctacacattcactgactacaacatggactgggtgaagcagagccatggaaagagccttgagtggattggagatattaatcctaactatgatattactagctacaaccagaagttcaagggaaaggccacattgactgtagacaagtcctccagcacagcctacatggagctccgcagcctgacatctgaggacactgcagtctattactgtgcaagaagagggttttttctttactacggtagtagctactattacttcgatgtctggggcgcagggaccacggtcaccgtctcctcagctagcaccaagggcccaagtgtgtttcccctggcccccagcagcaagtctacttccggcggaactgctgccctgggttgcctggtgaaggactacttccccgagcccgtgacagtgtcctggaactctggggctctgacttccggcgtgcacaccttccccgccgtgctgcagagcagcggcctgtacagcctgagcagcgtggtgacagtgccctccagctctctgggaacccagacctatatctgcaacgtgaaccacaagcccagcaacaccaaggtggacaagagagtggagcccaagagctgcgacaagacccacacctgccccccctgcccagctccagaactgctgggagggccttccgtgttcctgttcccccccaagcccaaggacaccctgatgatcagcaggacccccgaggtgacctgcgtggtggtggacgtgtcccacgaggacccagaggtgaagttcaactggtacgtggacggcgtggaggtgcacaacgccaagaccaagcccagagaggagcagtacaacagcacctacagggtggtgtccgtgctgaccgtgctgcaccaggactggctgaacggcaaagaatacaagtgcaaagtctccaacaaggccctgccagccccaatcgaaaagacaatcagcaaggccaagggccagccacgggagccccaggtgtacaccctgccccccagccgggaggagatgaccaagaaccaggtgtccctgacctgtctggtgaagggcttctaccccagcgatatcgccgtggagtgggagagcaacggccagcccgagaacaactacaagaccacccccccagtgctggacagcgacggcagcttcttcctgtacagcaagctgaccgtggacaagtccaggtggcagcagggcaacgtgttcagctgcagcgtgatgcacgaggccctgcacaaccactacacccagaagtccctgagcctgagccccggcaag

SEQ ID NO: 268 - protein, 106 aa, Artificial Sequence
  source: /note="Description of Artificial Sequence: Synthetic polypeptide"
QIVLTQSPAIMSASLGEEITLTCSASSSVSYMHWYQQKSGTSPKLLIYSTSNLASGVPSRFSGSGSGTFYSLTISSVEAEDAADYYCHQWSSYPWTFGGGTKLEIK

SEQ ID NO: 269 - DNA, 318 bp, Artificial Sequence
  source: /note="Description of Artificial Sequence: Synthetic polynucleotide"
caaattgttctcacccagtctccagcaatcatgtctgcatctctaggggaggagatcaccctaacctgcagtgccagctcgagtgtaagttacatgcactggtaccagcagaagtcaggcacttctcccaaactcttgatttatagcacatccaacctggcttctggagtcccttctcgcttcagtggcagtgggtctgggaccttttattctctcacaatcagcagtgtggaggctgaagatgctgccgattattactgccatcagtggagtagttatccatggacgttcggtggaggcaccaagctggaaatcaaa

SEQ ID NO: 270 - protein, 213 aa, Artificial Sequence
  source: /note="Description of Artificial Sequence: Synthetic polypeptide"
QIVLTQSPAIMSASLGEEITLTCSASSSVSYMHWYQQKSGTSPKLLIYSTSNLASGVPSRFSGSGSGTFYSLTISSVEAEDAADYYCHQWSSYPWTFGGGTKLEIKRTVAAPSVFIFPPSDEQLKSGTASVVCLLNNFYPREAKVQWKVDNALQSGNSQESVTEQDSKDSTYSLSSTLTLSKADYEKHKVYACEVTHQGLSSPVTKSFNRGEC

SEQ ID NO: 271 - DNA, 639 bp, Artificial Sequence
  source: /note="Description of Artificial Sequence: Synthetic polynucleotide"
caaattgttctcacccagtctccagcaatcatgtctgcatctctaggggaggagatcaccctaacctgcagtgccagctcgagtgtaagttacatgcactggtaccagcagaagtcaggcacttctcccaaactcttgatttatagcacatccaacctggcttctggagtcccttctcgcttcagtggcagtgggtctgggaccttttattctctcacaatcagcagtgtggaggctgaagatgctgccgattattactgccatcagtggagtagttatccatggacgttcggtggaggcaccaagctggaaatcaaacgtacggtggccgctcccagcgtgttcatcttcccccccagcgacgagcagctgaagagtggcaccgccagcgtggtgtgcctgctgaacaacttctacccccgggaggccaaggtgcagtggaaggtggacaacgccctgcagagcggcaacagccaggagagcgtcaccgagcaggacagcaaggactccacctacagcctgagcagcaccctgaccctgagcaaggccgactacgagaagcataaggtgtacgcctgcgaggtgacccaccagggcctgtccagccccgtgaccaagagcttcaacaggggcgagtgc

SEQ ID NO: 272 - protein, 5 aa, Artificial Sequence
  source: /note="Description of Artificial Sequence: Synthetic peptide"
EYTMH

SEQ ID NO: 273 - protein, 17 aa, Artificial Sequence
  source: /note="Description of Artificial Sequence: Synthetic peptide"
GINPNNGITTYNQKFKG

SEQ ID NO: 274 - protein, 17 aa, Artificial Sequence
  source: /note="Description of Artificial Sequence: Synthetic peptide"
RGFPIYYYGTSLYYFDY

SEQ ID NO: 275 - protein, 7 aa, Artificial Sequence
  source: /note="Description of Artificial Sequence: Synthetic peptide"
GYTFTEY

SEQ ID NO: 276 - protein, 6 aa, Artificial Sequence
  source: /note="Description of Artificial Sequence: Synthetic peptide"
NPNNGI

SEQ ID NO: 277 - protein, 10 aa, Artificial Sequence
  source: /note="Description of Artificial Sequence: Synthetic peptide"
GYTFTEYTMH

SEQ ID NO: 278 - protein, 8 aa, Artificial Sequence
  source: /note="Description of Artificial Sequence: Synthetic peptide"
GYTFTEYT

SEQ ID NO: 279 - protein, 8 aa, Artificial Sequence
  source: /note="Description of Artificial Sequence: Synthetic peptide"
INPNNGIT

SEQ ID NO: 280 - protein, 19 aa, Artificial Sequence
  source: /note="Description of Artificial Sequence: Synthetic peptide"
ARRGFPIYYYGTSLYYFDY

SEQ ID NO: 281 - protein, 126 aa, Artificial Sequence
  source: /note="Description of Artificial Sequence: Synthetic polypeptide"
EVQLQQSGPELVKPGASVKISCKTSGYTFTEYTMHWVKQSHGKSLEWIGGINPNNGITTYNQKFKGKATLTVDKSSSTAYMDLRSLTSEGSAVYYCARRGFPIYYYGTSLYYFDYWGQGTTLTVSS

SEQ ID NO: 282 - DNA, 378 bp, Artificial Sequence
  source: /note="Description of Artificial Sequence: Synthetic polynucleotide"
gaggtccagctgcaacagtctggacctgagctggtgaagcctggggcttcagtgaagatatcctgcaagacttctggatacacattcactgaatacaccatgcactgggtgaagcagagccatggaaagagccttgagtggattggaggtattaatcctaacaatggtattactacttacaaccagaagttcaagggcaaggccacattgactgtagacaagtcctccagcacagcctacatggacctccgcagcctgacatctgagggttctgcagtctattactgtgcaagaaggggattccctatttattactacggtactagcctctactactttgactactggggccaaggcaccactctcacagtctcctca

SEQ ID NO: 283 - protein, 456 aa, Artificial Sequence
  source: /note="Description of Artificial Sequence: Synthetic polypeptide"
EVQLQQSGPELVKPGASVKISCKTSGYTFTEYTMHWVKQSHGKSLEWIGGINPNNGITTYNQKFKGKATLTVDKSSSTAYMDLRSLTSEGSAVYYCARRGFPIYYYGTSLYYFDYWGQGTTLTVSSASTKGPSVFPLAPSSKSTSGGTAALGCLVKDYFPEPVTVSWNSGALTSGVHTFPAVLQSSGLYSLSSVVTVPSSSLGTQTYICNVNHKPSNTKVDKRVEPKSCDKTHTCPPCPAPELLGGPSVFLFPPKPKDTLMISRTPEVTCVVVDVSHEDPEVKFNWYVDGVEVHNAKTKPREEQYNSTYRVVSVLTVLHQDWLNGKEYKCKVSNKALPAPIEKTISKAKGQPREPQVYTLPPSREEMTKNQVSLTCLVKGFYPSDIAVEWESNGQPENNYKTTPPVLDSDGSFFLYSKLTVDKSRWQQGNVFSCSVMHEALHNHYTQKSLSLSPGK

SEQ ID NO: 284 - DNA, 1368 bp, Artificial Sequence
  source: /note="Description of Artificial Sequence: Synthetic polynucleotide"
gaggtccagctgcaacagtctggacctgagctggtgaagcctggggcttcagtgaagatatcctgcaagacttctggatacacattcactgaatacaccatgcactgggtgaagcagagccatggaaagagccttgagtggattggaggtattaatcctaacaatggtattactacttacaaccagaagttcaagggcaaggccacattgactgtagacaagtcctccagcacagcctacatggacctccgcagcctgacatctgagggttctgcagtctattactgtgcaagaaggggattccctatttattactacggtactagcctctactactttgactactggggccaaggcaccactctcacagtctcctcagctagcaccaagggcccaagtgtgtttcccctggcccccagcagcaagtctacttccggcggaactgctgccctgggttgcctggtgaaggactacttccccgagcccgtgacagtgtcctggaactctggggctctgacttccggcgtgcacaccttccccgccgtgctgcagagcagcggcctgtacagcctgagcagcgtggtgacagtgccctccagctctctgggaacccagacctatatctgcaacgtgaaccacaagcccagcaacaccaaggtggacaagagagtggagcccaagagctgcgacaagacccacacctgccccccctgcccagctccagaactgctgggagggccttccgtgttcctgttcccccccaagcccaaggacaccctgatgatcagcaggacccccgaggtgacctgcgtggtggtggacgtgtcccacgaggacccagaggtgaagttcaactggtacgtggacggcgtggaggtgcacaacgccaagaccaagcccagagaggagcagtacaacagcacctacagggtggtgtccgtgctgaccgtgctgcaccaggactggctgaacggcaaagaatacaagtgcaaagtctccaacaaggccctgccagccccaatcgaaaagacaatcagcaaggccaagggccagccacgggagccccaggtgtacaccctgccccccagccgggaggagatgaccaagaaccaggtgtccctgacctgtctggtgaagggcttctaccccagcgatatcgccgtggagtgggagagcaacggccagcccgagaacaactacaagaccacccccccagtgctggacagcgacggcagcttcttcctgtacagcaagctgaccgtggacaagtccaggtggcagcagggcaacgtgttcagctgcagcgtgatgcacgaggccctgcacaaccactacacccagaagtccctgagcctgagccccggcaag

SEQ ID NO: 285 - protein, 7 aa, Artificial Sequence
  source: /note="Description of Artificial Sequence: Synthetic peptide"
TTSNLAS

SEQ ID NO: 286 - protein, 3 aa, Artificial Sequence
  source: /note="Description of Artificial Sequence: Synthetic peptide"
TTS

SEQ ID NO: 287 - protein, 106 aa, Artificial Sequence
  source: /note="Description of Artificial Sequence: Synthetic polypeptide"
QIVLTQSPAIMSASLGEEITLTCSASSSVSYMHWYQQRSGTSPKLLIYTTSNLASGVPSRFSGSGSGTFYSLTISSVEAEDAADYYCHQWSSYPWTFGGGTKLEIK

SEQ ID NO: 288 - DNA, 318 bp, Artificial Sequence
  source: /note="Description of Artificial Sequence: Synthetic polynucleotide"
caaattgttctcacccagtctccagcaatcatgtctgcatctctaggggaggagatcaccctaacctgcagtgccagctcgagtgtaagttacatgcactggtaccagcagaggtcaggcacttctcccaaactcttgatttataccacatccaacctggcttctggagtcccttctcgcttcagtggcagtgggtctgggaccttttattctctcacaatcagcagtgtggaggctgaagatgctgccgattattactgccatcagtggagtagttatccgtggacgttcggtggaggcaccaagctggaaatcaaa

SEQ ID NO: 289 - protein, 213 aa, Artificial Sequence
  source: /note="Description of Artificial Sequence: Synthetic polypeptide"
QIVLTQSPAIMSASLGEEITLTCSASSSVSYMHWYQQRSGTSPKLLIYTTSNLASGVPSRFSGSGSGTFYSLTISSVEAEDAADYYCHQWSSYPWTFGGGTKLEIKRTVAAPSVFIFPPSDEQLKSGTASVVCLLNNFYPREAKVQWKVDNALQSGNSQESVTEQDSKDSTYSLSSTLTLSKADYEKHKVYACEVTHQGLSSPVTKSFNRGEC

SEQ ID NO: 290 - DNA, 639 bp, Artificial Sequence
  source: /note="Description of Artificial Sequence: Synthetic polynucleotide"
caaattgttctcacccagtctccagcaatcatgtctgcatctctaggggaggagatcaccctaacctgcagtgccagctcgagtgtaagttacatgcactggtaccagcagaggtcaggcacttctcccaaactcttgatttataccacatccaacctggcttctggagtcccttctcgcttcagtggcagtgggtctgggaccttttattctctcacaatcagcagtgtggaggctgaagatgctgccgattattactgccatcagtggagtagttatccgtggacgttcggtggaggcaccaagctggaaatcaaacgtacggtggccgctcccagcgtgttcatcttcccccccagcgacgagcagctgaagagtggcaccgccagcgtggtgtgcctgctgaacaacttctacccccgggaggccaaggtgcagtggaaggtggacaacgccctgcagagcggcaacagccaggagagcgtcaccgagcaggacagcaaggactccacctacagcctgagcagcaccctgaccctgagcaaggccgactacgagaagcataaggtgtacgcctgcgaggtgacccaccagggcctgtccagccccgtgaccaagagcttcaacaggggcgagtgc

SEQ ID NO: 291 - protein, 495 aa, Homo sapiens
MAGKVRSLLPPLLLAAAGLAGLLLLCVPTRDVREPPALKYGIVLDAGSSHTSMFIYKWPADKENDTGIVGQHSSCDVPGGGISSYADNPSGASQSLVGCLEQALQDVPKERHAGTPLYLGATAGMRLLNLTNPEASTSVLMAVTHTLTQYPFDFRGARILSGQEEGVFGWVTANYLLENFIKYGWVGRWFRPRKGTLGAMDLGGASTQITFETTSPAEDRASEVQLHLYGQHYRVYTHSFLCYGRDQVLQRLLASALQTHGFHPCWPRGFSTQVLLGDVYQSPCTMAQRPQNFNSSARVSLSGSSDPHLCRDLVSGLFSFSSCPFSRCSFNGVFQPPVAGNFVAFSAFFYTVDFLRTSMGLPVATLQQLEAAAVNVCNQTWAQLQARVPGQRARLADYCAGAMFVQQLLSRGYGFDERAFGGVIFQKKAADTAVGWALGYMLNLTNLIPADPPGLRKGTDFSSWVVLLLLFASALLAALVLLLRQVHSAKLPSTI

SEQ ID NO: 292 - DNA, 2156 bp, Homo sapiens
ggctccccgcactctccgggtccacgcatcgtcctcccgcgcgcccgcccgcccatggccgggaaggtgcggtcactgctgccgccgctgctgctggccgccgcgggcctcgccggcctcctactgctgtgcgtccccacccgcgacgtccgggagccgcccgccctcaagtatggcatcgtcctggacgctggttcttcacacacgtccatgtttatctacaagtggccggcagacaaggagaacgacacaggcattgtgggccagcacagctcctgtgatgttccaggtgggggcatctccagctatgcagacaacccttctggggccagccagagtcttgttggatgcctcgaacaggcgcttcaggatgtgcccaaagagagacacgcgggcacacccctctacctgggagccacagcgggtatgcgcctgctcaacctgaccaatccagaggcctcgaccagtgtgctcatggcagtgactcacacactgacccagtacccctttgacttccggggtgcacgcatcctctcgggccaggaagagggggtgtttggctgggtgactgccaactacctgctggagaacttcatcaagtacggctgggtgggccggtggttccggccacggaaggggacactgggggccatggacctggggggtgcctctacccagatcacttttgagacaaccagtccagctgaggacagagccagcgaggtccagctgcatctctacggccagcactaccgagtctacacccacagcttcctctgctatggccgtgaccaggtcctccagaggctgctggccagcgccctccagacccacggcttccacccctgctggccgaggggcttttccacccaagtgctgctcggggatgtgtaccagtcaccatgcaccatggcccagcggccccagaacttcaacagcagtgccagggtcagcctgtcagggagcagtgacccccacctctgccgagatctggtttctgggctcttcagcttctcctcctgccccttctcccgatgctctttcaatggggtcttccagcccccagtggctgggaactttgtggccttctctgccttcttctacactgtggactttttgcggacttcgatggggctgcccgtggccaccctgcagcagctggaggcagccgcagtgaatgtctgcaaccagacctgggctcagctgcaagctcgggtgccagggcaacgggcccgcctggccgactactgcgccggggccatgttcgtgcagcagctgctgagtcgcggctacggcttcgacgagcgcgccttcggcggcgtgatcttccagaagaaggccgcggacactgcagtgggctgggcgctcggctacatgctgaacctgaccaacctgatccccgccgacccgccggggctgcgcaagggcacagacttcagctcctgggtcgtcctcctgctgctcttcgcctccgcgctcctggctgcgcttgtcctgctgctgcgtcaggtgcactccgccaagctgccaagcaccatttaggggccgacgggggcagctgccccatccctcccccaacccctgtatccccaccccgtactcccacccctcccacaacccctgtacctcccacccctgtatccccacccctccacccacccctctcccaacctctctccccgcccctgtatcctgcattcctccacccaccctctatcccccaccgctccaccccaccactgtcttctccatccttccaccccaccctcagcgtctctgcccctaaggcagcccaggaaataggaactgagactctggtacccacaggagcctgggtgggcaaagagcgctcaatccagctccttgaacccctccagcccgcttcagcctgggcatcactgcaggccccgtgctcctcctcctcctcctcagggctgggtctccagagagtggggccttggtcctgagaatcagcccttagaggctccttctgtgtagtctgggtctgtactggggagggtcacagcccacgggctggcagccagcccagcacctacttgtaaaaattttgtaataaaaagtttttcctagagacgtgaaaaaaaaaaaaaaaaaaaaaaaaaaaaaaaaaaaaaaaaaaaaaaaaaaaaaaaaaa

SEQ ID NO: 293 - protein, 472 aa, Homo sapiens
MAGKVRSLLPPLLLAAAGLAGLLLLCVPTRDVREPPALKYGIVLDAGSSHTSMFIYKWPADKENDTGIVGQHSSCDVPGGGISSYADNPSGASQSLVGCLEQALQDVPKERHAGTPLYLGATAGMRLLNLTNPEASTSVLMAVTHTLTQYPFDFRGARILSGQEEGVFGWVTANYLLENFIKYGWVGRWFRPRKGTLGAMDLGGASTQITFETTSPAEDRASEVQLHLYGQHYRVYTHSFLCYGRDQVLQRLLASALQTHGFHPCWPRGFSTQVLLGDVYQSPCTMAQRPQNFNSSARVSLSGSSDPHLCRDLVSGLFSFSSCPFSRCSFNGVFQPPVAGNFVAFSAFFYTVDFLRTSMGLPVATLQQLEAAAVNVCNQTWAQQLLSRGYGFDERAFGGVIFQKKAADTAVGWALGYMLNLTNLIPADPPGLRKGTDFSSWVVLLLLFASALLAALVLLLRQVHSAKLPSTI

SEQ ID NO: 294 - DNA, 2084 bp, Homo sapiens
ggctccccgcactctccgggtccacgcatcgtcctcccgcgcgcccgcccgcccatggccgggaaggtgcggtcactgctgccgccgctgctgctggccgccgcgggcctcgccggcctcctactgctgtgcgtccccacccgcgacgtccgggagccgcccgccctcaagtatggcatcgtcctggacgctggttcttcacacacgtccatgtttatctacaagtggccggcagacaaggagaacgacacaggcattgtgggccagcacagctcctgtgatgttccaggtgggggcatctccagctatgcagacaacccttctggggccagccagagtcttgttggatgcctcgaacaggcgcttcaggatgtgcccaaagagagacacgcgggcacacccctctacctgggagccacagcgggtatgcgcctgctcaacctgaccaatccagaggcctcgaccagtgtgctcatggcagtgactcacacactgacccagtacccctttgacttccggggtgcacgcatcctctcgggccaggaagagggggtgtttggctgggtgactgccaactacctgctggagaacttcatcaagtacggctgggtgggccggtggttccggccacggaaggggacactgggggccatggacctggggggtgcctctacccagatcacttttgagacaaccagtccagctgaggacagagccagcgaggtccagctgcatctctacggccagcactaccgagtctacacccacagcttcctctgctatggccgtgaccaggtcctccagaggctgctggccagcgccctccagacccacggcttccacccctgctggccgaggggcttttccacccaagtgctgctcggggatgtgtaccagtcaccatgcaccatggcccagcggccccagaacttcaacagcagtgccagggtcagcctgtcagggagcagtgacccccacctctgccgagatctggtttctgggctcttcagcttctcctcctgccccttctcccgatgctctttcaatggggtcttccagcccccagtggctgggaactttgtggccttctctgccttcttctacactgtggactttttgcggacttcgatggggctgcccgtggccaccctgcagcagctggaggcagccgcagtgaatgtctgcaaccagacctgggctcagcagctgctgagtcgcggctacggcttcgacgagcgcgccttcggcggcgtgatcttccagaagaaggccgcggacactgcagtgggctgggcgctcggctacatgctgaacctgaccaacctgatccccgccgacccgccggggctgcgcaagggcacagacttcagctcctgggtcgtcctcctgctgctcttcgcctccgcgctcctggctgcgcttgtcctgctgctgcgtcaggtgcactccgccaagctgccaagcaccatttaggggccgacgggggcagctgccccatccctcccccaacccctgtatccccaccccgtactcccacccctcccacaacccctgtacctcccacccctgtatccccacccctccacccacccctctcccaacctctctccccgcccctgtatcctgcattcctccacccaccctctatcccccaccgctccaccccaccactgtcttctccatccttccaccccaccctcagcgtctctgcccctaaggcagcccaggaaataggaactgagactctggtacccacaggagcctgggtgggcaaagagcgctcaatccagctccttgaacccctccagcccgcttcagcctgggcatcactgcaggccccgtgctcctcctcctcctcctcagggctgggtctccagagagtggggccttggtcctgagaatcagcccttagaggctccttctgtgtagtctgggtctgtactggggagggtcacagcccacgggctggcagccagcccagcacctacttgtaaaaattttgtaataaaaagtttttcctagagacgtgaaaaaaaaaaaaaaaaaaaaaaaaaaaaaaaaaaaaaaaaaaaaaaaaaaaaaaa

SEQ ID NO: 295 - protein, 5 aa, Artificial Sequence
  source: /note="Description of Artificial Sequence: Synthetic peptide"
TYWMH

SEQ ID NO: 296 - protein, 17 aa, Artificial Sequence
  source: /note="Description of Artificial Sequence: Synthetic peptide"
NIYPGTGGSNFDEKFKN

SEQ ID NO: 297 - protein, 8 aa, Artificial Sequence
  source: /note="Description of Artificial Sequence: Synthetic peptide"
WTTGTGAY

SEQ ID NO: 298 - protein, 7 aa, Artificial Sequence
  source: /note="Description of Artificial Sequence: Synthetic peptide"
GYTFTTY

SEQ ID NO: 299 - protein, 6 aa, Artificial Sequence
  source: /note="Description of Artificial Sequence: Synthetic peptide"
YPGTGG

SEQ ID NO: 300 - protein, 117 aa, Artificial Sequence
  source: /note="Description of Artificial Sequence: Synthetic polypeptide"
EVQLVQSGAEVKKPGESLRISCKGSGYTFTTYWMHWVRQATGQGLEWMGNIYPGTGGSNFDEKFKNRVTITADKSTSTAYMELSSLRSEDTAVYYCTRWTTGTGAYWGQGTTVTVSS

SEQ ID NO: 301 - DNA, 351 bp, Artificial Sequence
  source: /note="Description of Artificial Sequence: Synthetic polynucleotide"
gaggtgcagctggtgcagtcaggcgccgaagtgaagaagcccggcgagtcactgagaattagctgtaaaggttcaggctacaccttcactacctactggatgcactgggtccgccaggctaccggtcaaggcctcgagtggatgggtaatatctaccccggcaccggcggctctaacttcgacgagaagtttaagaatagagtgactatcaccgccgataagtctactagcaccgcctatatggaactgtctagcctgagatcagaggacaccgccgtctactactgcactaggtggactaccggcacaggcgcctactggggtcaaggcactaccgtgaccgtgtctagc

SEQ ID NO: 302 - protein, 443 aa, Artificial Sequence
  source: /note="Description of Artificial Sequence: Synthetic polypeptide"
EVQLVQSGAEVKKPGESLRISCKGSGYTFTTYWMHWVRQATGQGLEWMGNIYPGTGGSNFDEKFKNRVTITADKSTSTAYMELSSLRSEDTAVYYCTRWTTGTGAYWGQGTTVTVSSASTKGPSVFPLAPCSRSTSESTAALGCLVKDYFPEPVTVSWNSGALTSGVHTFPAVLQSSGLYSLSSVVTVPSSSLGTKTYTCNVDHKPSNTKVDKRVESKYGPPCPPCPAPEFLGGPSVFLFPPKPKDTLMISRTPEVTCVVVDVSQEDPEVQFNWYVDGVEVHNAKTKPREEQFNSTYRVVSVLTVLHQDWLNGKEYKCKVSNKGLPSSIEKTISKAKGQPREPQVYTLPPSQEEMTKNQVSLTCLVKGFYPSDIAVEWESNGQPENNYKTTPPVLDSDGSFFLYSRLTVDKSRWQEGNVFSCSVMHEALHNHYTQKSLSLSLG

SEQ ID NO: 303 - DNA, 1329 bp, Artificial Sequence
  source: /note="Description of Artificial Sequence: Synthetic polynucleotide"
gaggtgcagctggtgcagtcaggcgccgaagtgaagaagcccggcgagtcactgagaattagctgtaaaggttcaggctacaccttcactacctactggatgcactgggtccgccaggctaccggtcaaggcctcgagtggatgggtaatatctaccccggcaccggcggctctaacttcgacgagaagtttaagaatagagtgactatcaccgccgataagtctactagcaccgcctatatggaactgtctagcctgagatcagaggacaccgccgtctactactgcactaggtggactaccggcacaggcgcctactggggtcaaggcactaccgtgaccgtgtctagcgctagcactaagggcccgtccgtgttccccctggcaccttgtagccggagcactagcgaatccaccgctgccctcggctgcctggtcaaggattacttcccggagcccgtgaccgtgtcctggaacagcggagccctgacctccggagtgcacaccttccccgctgtgctgcagagctccgggctgtactcgctgtcgtcggtggtcacggtgccttcatctagcctgggtaccaagacctacacttgcaacgtggaccacaagccttccaacactaaggtggacaagcgcgtcgaatcgaagtacggcccaccgtgcccgccttgtcccgcgccggagttcctcggcggtccctcggtctttctgttcccaccgaagcccaaggacactttgatgatttcccgcacccctgaagtgacatgcgtggtcgtggacgtgtcacaggaagatccggaggtgcagttcaattggtacgtggatggcgtcgaggtgcacaacgccaaaaccaagccgagggaggagcagttcaactccacttaccgcgtcgtgtccgtgctgacggtgctgcatcaggactggctgaacgggaaggagtacaagtgcaaagtgtccaacaagggacttcctagctcaatcgaaaagaccatctcgaaagccaagggacagccccgggaaccccaagtgtataccctgccaccgagccaggaagaaatgactaagaaccaagtctcattgacttgccttgtgaagggcttctacccatcggatatcgccgtggaatgggagtccaacggccagccggaaaacaactacaagaccacccctccggtgctggactcagacggatccttcttcctctactcgcggctgaccgtggataagagcagatggcaggagggaaatgtgttcagctgttctgtgatgcatgaagccctgcacaaccactacactcagaagtccctgtccctctccctggga

SEQ ID NO: 304 - protein, 17 aa, Artificial Sequence
  source: /note="Description of Artificial Sequence: Synthetic peptide"
KSSQSLLDSGNQKNFLT

SEQ ID NO: 305 - protein, 7 aa, Artificial Sequence
  source: /note="Description of Artificial Sequence: Synthetic peptide"
WASTRES

SEQ ID NO: 306 - protein, 9 aa, Artificial Sequence
  source: /note="Description of Artificial Sequence: Synthetic peptide"
QNDYSYPYT

SEQ ID NO: 307 - protein, 13 aa, Artificial Sequence
  source: /note="Description of Artificial Sequence: Synthetic peptide"
SQSLLDSGNQKNF

SEQ ID NO: 308 - protein, 3 aa, Artificial Sequence
  source: /note="Description of Artificial Sequence: Synthetic peptide"
WAS

SEQ ID NO: 309 - protein, 6 aa, Artificial Sequence
  source: /note="Description of Artificial Sequence: Synthetic peptide"
DYSYPY

SEQ ID NO: 310 - protein, 113 aa, Artificial Sequence
  source: /note="Description of Artificial Sequence: Synthetic polypeptide"
EIVLTQSPATLSLSPGERATLSCKSSQSLLDSGNQKNFLTWYQQKPGKAPKLLIYWASTRESGVPSRFSGSGSGTDFTFTISSLQPEDIATYYCQNDYSYPYTFGQGTKVEIK

SEQ ID NO: 311 - DNA, 339 bp, Artificial Sequence
  source: /note="Description of Artificial Sequence: Synthetic polynucleotide"
gagatcgtcctgactcagtcacccgctaccctgagcctgagccctggcgagcgggctacactgagctgtaaatctagtcagtcactgctggatagcggtaatcagaagaacttcctgacctggtatcagcagaagcccggtaaagcccctaagctgctgatctactgggcctctactagagaatcaggcgtgccctctaggtttagcggtagcggtagtggcaccgacttcaccttcactatctctagcctgcagcccgaggatatcgctacctactactgtcagaacgactatagctacccctacaccttcggtcaaggcactaaggtcgagattaag

SEQ ID NO: 312 - protein, 220 aa, Artificial Sequence
  source: /note="Description of Artificial Sequence: Synthetic polypeptide"
EIVLTQSPATLSLSPGERATLSCKSSQSLLDSGNQKNFLTWYQQKPGKAPKLLIYWASTRESGVPSRFSGSGSGTDFTFTISSLQPEDIATYYCQNDYSYPYTFGQGTKVEIKRTVAAPSVFIFPPSDEQLKSGTASVVCLLNNFYPREAKVQWKVDNALQSGNSQESVTEQDSKDSTYSLSSTLTLSKADYEKHKVYACEVTHQGLSSPVTKSFNRGEC

SEQ ID NO: 313 - DNA, 660 bp, Artificial Sequence
  source: /note="Description of Artificial Sequence: Synthetic polynucleotide"
gagatcgtcctgactcagtcacccgctaccctgagcctgagccctggcgagcgggctacactgagctgtaaatctagtcagtcactgctggatagcggtaatcagaagaacttcctgacctggtatcagcagaagcccggtaaagcccctaagctgctgatctactgggcctctactagagaatcaggcgtgccctctaggtttagcggtagcggtagtggcaccgacttcaccttcactatctctagcctgcagcccgaggatatcgctacctactactgtcagaacgactatagctacccctacaccttcggtcaaggcactaaggtcgagattaagcgtacggtggccgctcccagcgtgttcatcttcccccccagcgacgagcagctgaagagcggcaccgccagcgtggtgtgcctgctgaacaacttctacccccgggaggccaaggtgcagtggaaggtggacaacgccctgcagagcggcaacagccaggagagcgtcaccgagcaggacagcaaggactccacctacagcctgagcagcaccctgaccctgagcaaggccgactacgagaagcataaggtgtacgcctgcgaggtgacccaccagggcctgtccagccccgtgaccaagagcttcaacaggggcgagtgc

SEQ ID NO: 314 - protein, 113 aa, Artificial Sequence
  source: /note="Description of Artificial Sequence: Synthetic polypeptide"
EIVLTQSPATLSLSPGERATLSCKSSQSLLDSGNQKNFLTWYQQKPGQAPRLLIYWASTRESGVPSRFSGSGSGTDFTFTISSLEAEDAATYYCQNDYSYPYTFGQGTKVEIK

SEQ ID NO: 315 - DNA, 339 bp, Artificial Sequence
  source: /note="Description of Artificial Sequence: Synthetic polynucleotide"
gagatcgtcctgactcagtcacccgctaccctgagcctgagccctggcgagcgggctacactgagctgtaaatctagtcagtcactgctggatagcggtaatcagaagaacttcctgacctggtatcagcagaagcccggtcaagcccctagactgctgatctactgggcctctactagagaatcaggcgtgccctctaggtttagcggtagcggtagtggcaccgacttcaccttcactatctctagcctggaagccgaggacgccgctacctactactgtcagaacgactatagctacccctacaccttcggtcaaggcactaaggtcgagattaag

SEQ ID NO: 316 - protein, 220 aa, Artificial Sequence
  source: /note="Description of Artificial Sequence: Synthetic polypeptide"
EIVLTQSPATLSLSPGERATLSCKSSQSLLDSGNQKNFLTWYQQKPGQAPRLLIYWASTRESGVPSRFSGSGSGTDFTFTISSLEAEDAATYYCQNDYSYPYTFGQGTKVEIKRTVAAPSVFIFPPSDEQLKSGTASVVCLLNNFYPREAKVQWKVDNALQSGNSQESVTEQDSKDSTYSLSSTLTLSKADYEKHKVYACEVTHQGLSSPVTKSFNRGEC

SEQ ID NO: 317 - DNA, 660 bp, Artificial Sequence
  source: /note="Description of Artificial Sequence: Synthetic polynucleotide"
gagatcgtcctgactcagtcacccgctaccctgagcctgagccctggcgagcgggctacactgagctgtaaatctagtcagtcactgctggatagcggtaatcagaagaacttcctgacctggtatcagcagaagcccggtcaagcccctagactgctgatctactgggcctctactagagaatcaggcgtgccctctaggtttagcggtagcggtagtggcaccgacttcaccttcactatctctagcctggaagccgaggacgccgctacctactactgtcagaacgactatagctacccctacaccttcggtcaaggcactaaggtcgagattaagcgtacggtggccgctcccagcgtgttcatcttcccccccagcgacgagcagctgaagagcggcaccgccagcgtggtgtgcctgctgaacaacttctacccccgggaggccaaggtgcagtggaaggtggacaacgccctgcagagcggcaacagccaggagagcgtcaccgagcaggacagcaaggactccacctacagcctgagcagcaccctgaccctgagcaaggccgactacgagaagcataaggtgtacgcctgcgaggtgacccaccagggcctgtccagccccgtgaccaagagcttcaacaggggcgagtgc

SEQ ID NO: 318 - DNA, 15 bp, Artificial Sequence
  source: /note="Description of Artificial Sequence: Synthetic oligonucleotide"
acctactggatgcac

SEQ ID NO: 319 - DNA, 51 bp, Artificial Sequence
  source: /note="Description of Artificial Sequence: Synthetic oligonucleotide"
aatatctaccccggcaccggcggctctaacttcgacgagaagtttaagaat

SEQ ID NO: 320 - DNA, 24 bp, Artificial Sequence
  source: /note="Description of Artificial Sequence: Synthetic oligonucleotide"
tggactaccggcacaggcgcctac

SEQ ID NO: 321 - DNA, 21 bp, Artificial Sequence
  source: /note="Description of Artificial Sequence: Synthetic oligonucleotide"
ggctacaccttcactacctac

SEQ ID NO: 322 - DNA, 18 bp, Artificial Sequence
  source: /note="Description of Artificial Sequence: Synthetic oligonucleotide"
taccccggcaccggcggc

SEQ ID NO: 323 - DNA, 51 bp, Artificial Sequence
  source: /note="Description of Artificial Sequence: Synthetic oligonucleotide"
aaatctagtcagtcactgctggatagcggtaatcagaagaacttcctgacc

SEQ ID NO: 324 - DNA, 21 bp, Artificial Sequence
  source: /note="Description of Artificial Sequence: Synthetic oligonucleotide"
tgggcctctactagagaatca

SEQ ID NO: 325 - DNA, 27 bp, Artificial Sequence
  source: /note="Description of Artificial Sequence: Synthetic oligonucleotide"
cagaacgactatagctacccctacacc

SEQ ID NO: 326 - DNA, 39 bp, Artificial Sequence
  source: /note="Description of Artificial Sequence: Synthetic oligonucleotide"
agtcagtcactgctggatagcggtaatcagaagaacttc

SEQ ID NO: 327 - DNA, 9 bp, Artificial Sequence
  source: /note="Description of Artificial Sequence: Synthetic oligonucleotide"
tgggcctct

SEQ ID NO: 328 - protein, 124 aa, Artificial Sequence
  source: /note="Description of Artificial Sequence: Synthetic polypeptide"
EVKLEQSGPGLVKPSQSLSLTCSVTGYSITSGYYWNWIRQFPGNKLEWMSYISYDGDNNYNPSLKNRISITRDTSKNQFFLKLSSVTTEDTATYYCAGGYYRYGLSYYYVMDYWGQGTSVTVSA

SEQ ID NO: 329 - DNA, 372 bp, Artificial Sequence
  source: /note="Description of Artificial Sequence: Synthetic polynucleotide"
gaagtgaagctggagcagtcaggacctggcctcgtgaaaccttctcagtctctgtctctcacctgctctgtcactggctactccatcaccagtggttattactggaactggatccggcagtttccaggaaacaaactggaatggatgagctacataagctacgacggtgacaataactacaacccatctctcaaaaatcgaatctccatcactcgtgacacatctaagaaccagtttttcctgaagttgagttctgtgactactgaggacacagctacatattactgtgcaggaggctactataggtacggcctgtcgtattactatgttatggactactggggtcaaggaacctcagtcacagtctccgca

SEQ ID NO: 330 - protein, 227 aa, Artificial Sequence
  source: /note="Description of Artificial Sequence: Synthetic polypeptide"
EVKLEQSGPGLVKPSQSLSLTCSVTGYSITSGYYWNWIRQFPGNKLEWMSYISYDGDNNYNPSLKNRISITRDTSKNQFFLKLSSVTTEDTATYYCAGGYYRYGLSYYYVMDYWGQGTSVTVSAASTKGPSVFPLAPSSKSTSGGTAALGCLVKDYFPEPVTVSWNSGALTSGVHTFPAVLQSSGLYSLSSVVTVPSSSLGTQTYICNVNHKPSNTKVDKRVEPKSC

SEQ ID NO: 331 - DNA, 681 bp, Artificial Sequence
  source: /note="Description of Artificial Sequence: Synthetic polynucleotide"
gaagtgaagctggagcagtcaggacctggcctcgtgaaaccttctcagtctctgtctctcacctgctctgtcactggctactccatcaccagtggttattactggaactggatccggcagtttccaggaaacaaactggaatggatgagctacataagctacgacggtgacaataactacaacccatctctcaaaaatcgaatctccatcactcgtgacacatctaagaaccagtttttcctgaagttgagttctgtgactactgaggacacagctacatattactgtgcaggaggctactataggtacggcctgtcgtattactatgttatggactactggggtcaaggaacctcagtcacagtctccgcagctagcaccaagggcccaagtgtgtttcccctggcccccagcagcaagtctacttccggcggaactgctgccctgggttgcctggtgaaggactacttccccgagcccgtgacagtgtcctggaactctggggctctgacttccggcgtgcacaccttccccgccgtgctgcagagcagcggcctgtacagcctgagcagcgtggtgacagtgccctccagctctctgggaacccagacctatatctgcaacgtgaaccacaagcccagcaacaccaaggtggacaagagagtggagcccaagagctgc

SEQ ID NO: 332 - protein, 111 aa, Artificial Sequence
  source: /note="Description of Artificial Sequence: Synthetic polypeptide"
DIKMTQSPASLAVSLGQRATISCKASQSVDYDGNSYMNWYQQKPGQPPKLLIYAASNLESGIPARFSGSGSGTDFTLNIHPVEEEDAATYYCQQSNEDPPTFGGGTKLELK

SEQ ID NO: 333 - DNA, 333 bp, Artificial Sequence
  source: /note="Description of Artificial Sequence: Synthetic polynucleotide"
gatattaagatgacccaatctccagcctctttggctgtgtctctagggcagagggccaccatctcctgcaaggccagccaaagtgttgattatgatggtaatagttatatgaactggtaccaacagaaaccaggacagccacccaaactcctcatctatgctgcatccaatctagaatctgggatcccagccaggtttagtggcagtgggtctgggacagacttcaccctcaacatccatcctgtggaggaggaggatgctgcaacctattactgtcagcaaagtaatgaggatcctccgacgttcggtggaggcaccaagctggaactcaaa

SEQ ID NO: 334 - protein, 218 aa, Artificial Sequence
  source: /note="Description of Artificial Sequence: Synthetic polypeptide"
DIKMTQSPASLAVSLGQRATISCKASQSVDYDGNSYMNWYQQKPGQPPKLLIYAASNLESGIPARFSGSGSGTDFTLNIHPVEEEDAATYYCQQSNEDPPTFGGGTKLELKRTVAAPSVFIFPPSDEQLKSGTASVVCLLNNFYPREAKVQWKVDNALQSGNSQESVTEQDSKDSTYSLSSTLTLSKADYEKHKVYACEVTHQGLSSPVTKSFNRGEC

SEQ ID NO: 335 - DNA, 654 bp, Artificial Sequence
  source: /note="Description of Artificial Sequence: Synthetic polynucleotide"
gatattaagatgacccaatctccagcctctttggctgtgtctctagggcagagggccaccatctcctgcaaggccagccaaagtgttgattatgatggtaatagttatatgaactggtaccaacagaaaccaggacagccacccaaactcctcatctatgctgcatccaatctagaatctgggatcccagccaggtttagtggcagtgggtctgggacagacttcaccctcaacatccatcctgtggaggaggaggatgctgcaacctattactgtcagcaaagtaatgaggatcctccgacgttcggtggaggcaccaagctggaactcaaacgtacggtggccgctcccagcgtgttcatcttcccccccagcgacgagcagctgaagagtggcaccgccagcgtggtgtgcctgctgaacaacttctacccccgggaggccaaggtgcagtggaaggtggacaacgccctgcagagcggcaacagccaggagagcgtcaccgagcaggacagcaaggactccacctacagcctgagcagcaccctgaccctgagcaaggccgactacgagaagcataaggtgtacgcctgcgaggtgacccaccagggcctgtccagccccgtgaccaagagcttcaacaggggcgagtgc

SEQ ID NO: 336 - protein, 228 aa, Artificial Sequence
  source: /note="Description of Artificial Sequence: Synthetic polypeptide"
EVQLQQFGAELVKPGASVKISCKASGYTFTDYNMDWVKQSHGKSLEWIGDINPKYDISTYNQQFKGKATLTVDKSSSTAYMELRSLTSEDTAVYYCARRGFFLYYGINYYYFDVWGAGTTVTVSSASTKGPSVFPLAPSSKSTSGGTAALGCLVKDYFPEPVTVSWNSGALTSGVHTFPAVLQSSGLYSLSSVVTVPSSSLGTQTYICNVNHKPSNTKVDKRVEPKSC

SEQ ID NO: 337 - DNA, 684 bp, Artificial Sequence
  source: /note="Description of Artificial Sequence: Synthetic polynucleotide"
gaggtccaactgcaacagtttggagctgaactggtgaagcctggggcttcagtgaagatatcctgcaaggcttctggctacacattcactgactacaacatggactgggtgaagcagagccatggaaagagccttgagtggattggagatattaatcctaagtatgatatttctacctacaatcagcaattcaagggaaaggccacattgactgtagacaagtcctccagcacagcctacatggagctccgcagcctgacatctgaggacactgcagtctattattgtgcaagaagaggcttttttctttactacggtattaactactattacttcgatgtctggggcgcagggaccacggtcaccgtctcctcagctagcaccaagggcccaagtgtgtttcccctggcccccagcagcaagtctacttccggcggaactgctgccctgggttgcctggtgaaggactacttccccgagcccgtgacagtgtcctggaactctggggctctgacttccggcgtgcacaccttccccgccgtgctgcagagcagcggcctgtacagcctgagcagcgtggtgacagtgccctccagctctctgggaacccagacctatatctgcaacgtgaaccacaagcccagcaacaccaaggtggacaagagagtggagcccaagagctgc

SEQ ID NO: 338 - protein, 226 aa, Artificial Sequence
  source: /note="Description of Artificial Sequence: Synthetic polypeptide"
QVQLVQSGAELKQPGQSVKISCKASGYTFTHYGMNWVKQAPGQGLKWMGWINTDTGNPTYADDFKGRFVFSLDTSVSTAYLQISNLKNEDTATYYCVRYGTLYSGYGFFFDSWGQGTLVTVSSASTKGPSVFPLAPSSKSTSGGTAALGCLVKDYFPEPVTVSWNSGALTSGVHTFPAVLQSSGLYSLSSVVTVPSSSLGTQTYICNVNHKPSNTKVDKRVEPKSC

SEQ ID NO: 339 - DNA, 678 bp, Artificial Sequence
  source: /note="Description of Artificial Sequence: Synthetic polynucleotide"
caggtccagctggtgcagtcaggagctgagctgaagcagcctggacagtcggtgaagatctcctgcaaggcttcagggtacaccttcacacactatgggatgaactgggtgaagcaggcaccaggacagggtctaaagtggatgggctggatcaacactgacactgggaatccaacatatgctgatgacttcaaaggacggtttgtcttctccttggacacctctgtcagcactgcatatctgcagatcagcaacctcaagaatgaagacacggccacgtattactgtgtgagatatggaaccctatatagcggatatgggtttttttttgattcctggggccaagggaccctggtcaccgtctcctcagctagcaccaagggcccaagtgtgtttcccctggcccccagcagcaagtctacttccggcggaactgctgccctgggttgcctggtgaaggactacttccccgagcccgtgacagtgtcctggaactctggggctctgacttccggcgtgcacaccttccccgccgtgctgcagagcagcggcctgtacagcctgagcagcgtggtgacagtgccctccagctctctgggaacccagacctatatctgcaacgtgaaccacaagcccagcaacaccaaggtggacaagagagtggagcccaagagctgc

SEQ ID NO: 340 - protein, 220 aa, Artificial Sequence
  source: /note="Description of Artificial Sequence: Synthetic polypeptide"
DIMMTQSPSSLSVSAGEKATITCKSSQSLFNSNTNKNYLNWYLQKPGQSPKLLFYYASTRHTGVPDRFIGSGSGTDFTLTITSVQDEDLADYYCQQWYSYPWTFGPGTKLEIKRTVAAPSVFIFPPSDEQLKSGTASVVCLLNNFYPREAKVQWKVDNALQSGNSQESVTEQDSKDSTYSLSSTLTLSKADYEKHKVYACEVTHQGLSSPVTKSFNRGEC

SEQ ID NO: 341 - DNA, 660 bp, Artificial Sequence
  source: /note="Description of Artificial Sequence: Synthetic polynucleotide"
gacatcatgatgacccagtctccatcatccctgagtgtgtcagcaggagagaaagccactatcacctgcaagtccagtcagagtcttttcaacagtaacaccaacaagaactacttgaactggtacctgcagaaaccagggcagtctcctaaactgctgttctattatgcatccactaggcatactggggtccctgatcgcttcataggcagtggatctgggacagatttcactctcaccatcaccagtgtccaggatgaagacctggcagattattactgtcagcagtggtatagctacccgtggacgttcggacctggcaccaagctggaaatcaaacgtacggtggccgctcccagcgtgttcatcttcccccccagcgacgagcagctgaagagtggcaccgccagcgtggtgtgcctgctgaacaacttctacccccgggaggccaaggtgcagtggaaggtggacaacgccctgcagagcggcaacagccaggagagcgtcaccgagcaggacagcaaggactccacctacagcctgagcagcaccctgaccctgagcaaggccgactacgagaagcataaggtgtacgcctgcgaggtgacccaccagggcctgtccagccccgtgaccaagagcttcaacaggggcgagtgc

SEQ ID NO: 342 - DNA, 1485 bp, Homo sapiens
atggccgggaaggtgcggtcactgctgccgccgctgctgctggccgccgcgggcctcgccggcctcctactgctgtgcgtccccacccgcgacgtccgggagccgcccgccctcaagtatggcatcgtcctggacgctggttcttcacacacgtccatgtttatctacaagtggccggcagacaaggagaacgacacaggcattgtgggccagcacagctcctgtgatgttccaggtgggggcatctccagctatgcagacaacccttctggggccagccagagtcttgttggatgcctcgaacaggcgcttcaggatgtgcccaaagagagacacgcgggcacacccctctacctgggagccacagcgggtatgcgcctgctcaacctgaccaatccagaggcctcgaccagtgtgctcatggcagtgactcacacactgacccagtacccctttgacttccggggtgcacgcatcctctcgggccaggaagagggggtgtttggctgggtgactgccaactacctgctggagaacttcatcaagtacggctgggtgggccggtggttccggccacggaaggggacactgggggccatggacctggggggtgcctctacccagatcacttttgagacaaccagtccagctgaggacagagccagcgaggtccagctgcatctctacggccagcactaccgagtctacacccacagcttcctctgctatggccgtgaccaggtcctccagaggctgctggccagcgccctccagacccacggcttccacccctgctggccgaggggcttttccacccaagtgctgctcggggatgtgtaccagtcaccatgcaccatggcccagcggccccagaacttcaacagcagtgccagggtcagcctgtcagggagcagtgacccccacctctgccgagatctggtttctgggctcttcagcttctcctcctgccccttctcccgatgctctttcaatggggtcttccagcccccagtggctgggaactttgtggccttctctgccttcttctacactgtggactttttgcggacttcgatggggctgcccgtggccaccctgcagcagctggaggcagccgcagtgaatgtctgcaaccagacctgggctcagctgcaagctcgggtgccagggcaacgggcccgcctggccgactactgcgccggggccatgttcgtgcagcagctgctgagtcgcggctacggcttcgacgagcgcgccttcggcggcgtgatcttccagaagaaggccgcggacactgcagtgggctgggcgctcggctacatgctgaacctgaccaacctgatccccgccgacccgccggggctgcgcaagggcacagacttcagctcctgggtcgtcctcctgctgctcttcgcctccgcgctcctggctgcgcttgtcctgctgctgcgtcaggtgcactccgccaagctgccaagcaccatt

SEQ ID NO: 343 - protein, 495 aa, Macaca fascicularis
MAGKVRSLLPPLLLAAAGLAGLLLLCVPTRDIREPPALKYGIVLDAGSSHTSMFIYKWPADKENDTGIVGQHSSCDVPGGGISSYADNPSGAGQSLVGCLEQALRDVPKERHAGTPLYLGATAGMRLLNLTNPEASTSVLTAVTHTLTQYPFDFRGARILSGQEEGVFGWVTANYLLENFIKYGWVGRWFRPRKGTLGAMDLGGASTQITFETTSPAEDRASEVQLRLYGQHYRVYTHSFLCYGRDQVLQRLLASALQTHSFHPCWPRGFSTHVLLGDVYQSPCTVAQRPQTFNSSARVSLSGSSDPHLCRDLVSGLFSFSSCPFSRCSFNGVFQPPVAGNFIAFSAFFYTVNFLRTSMGLPVATLQQLEAAAVNVCNQTWAQLQARVPGQQAHLADYCAGAMFVQQLLSRGYGFDERAFGGVIFQKKAADTAVGWALGYMLNLTNLIPADPPGLRKGTDFSSWVVLLLLFASALLAALVLLLHQVHSAKLPSTI

SEQ ID NO: 344 - DNA, 1485 bp, Macaca fascicularis
atggccgggaaggtgcggtcactgctgccgccgctgctgctggccgccgcgggcctcgccggcctcctactgctgtgcgtgcccaccagggacattagggagcctcccgctctgaaatacggcatcgtgctggacgccggaagcagccacacctccatgttcatctacaagtggcccgccgacaaggagaacgacacaggcatcgtgggccagcatagctcctgcgacgtgcctggaggcggcatctccagctacgccgacaatccttccggcgctggacagtccctggtgggatgtctggagcaggccctgagggacgtgcctaaggagagacacgccggcacccctctgtacctgggagccacagccggcatgagactcctgaatctgaccaaccctgaggcctccacctccgtcctgacagccgtgacacataccctgacccagtaccccttcgatttcaggggagccagaatactgagcggccaggaagaaggcgtgttcggatgggtgaccgccaactacctcctggagaacttcatcaagtacggctgggtgggcaggtggtttagacccaggaagggcaccctgggagctatggatctgggcggagcttccacacagatcaccttcgagaccacctcccccgctgaggacagagcctccgaggtgcagctgaggctgtacggccagcattacagggtgtatacacacagcttcctgtgctacggcagggaccaggtcctgcagagactgctcgcttccgccctgcagacccactccttccacccttgctggcctaggggctttagcacccatgtgctcctgggagatgtgtaccagagcccctgcaccgtggcccaaagaccccagacctttaactcctccgctagagtgagcctgagcggcagctccgatccccacctgtgtagggacctggtcagcggactgttcagcttcagcagctgccctttcagcaggtgcagcttcaatggcgtgttccagcctcccgtggccggcaacttcatcgctttctccgccttcttctacaccgtcaactttctgaggacaagcatgggactgcccgtggctaccctccaacaactggaggccgccgccgtgaacgtgtgcaaccagacatgggcccaactgcaggctagggtgcccggccaacaggcccatctggctgactactgtgccggcgccatgttcgtgcagcagctgctgagcaggggctatggattcgacgagagggccttcggcggcgtcatcttccaaaagaaggccgccgatacagccgtgggctgggctctgggctacatgctgaacctgacaaacctgatccccgctgacccccccggactgaggaagggaaccgatttcagcagctgggtcgtgctcctgctgctgtttgctagcgccctgctcgccgctctggtgctgctgctgcaccaggtgcactccgccaagctgcccagcaccatt

SEQ ID NO: 345 - protein, 495 aa, Mus musculus
MAGKLVSLVPPLLLAAVGLAGLLLLCVPTQDVREPPALKYGIVLDAGSSHTSMFVYKWPADKENDTGIVGQHSSCDVRGGGISSYANDPSRAGQSLVECLEQALRDVPKDRYASTPLYLGATAGMRLLNLTSPEATAKVLEAVTQTLTRYPFDFRGARILSGQDEGVFGWVTANYLLENFIKYGWVGRWIRPRKGTLGAMDLGGASTQITFETTSPSEDPDNEVHLRLYGQHYRVYTHSFLCYGRDQVLQRLLASALQIHRFHPCWPKGYSTQVLLREVYQSPCTMGQRPQTFNSSATVSLSGTSNAALCRDLVSGLFNISSCPFSQCSFNGVFQPPVAGNFIAFSAFYYTVDFLKTVMGLPVGTLKQLEDATETTCNQTWAELQARVPGQQTRLPDYCAVAMFIHQLLSRGYRFDERSFRGVVFEKKAADTAVGWALGYMLNLTNLIPADLPGLRKGTHFSSWVALLLLFTVLILAALVLLLRQVRSAKSPGAL

SEQ ID NO: 346 - DNA, 1485 bp, Mus musculus
atggctggaaagttggtgtcactggtgccacccctgctgctggctgccgtgggcctcgccggcctcctgctactgtgcgtccctacccaagacgtccgggagccgcccgccctcaagtatggcatcgttctggatgctggctcttcacacacatccatgtttgtctacaagtggccagcggacaaggaaaatgacacaggtatcgtgggccagcacagctcttgcgatgttcgaggtggtggcatctccagctacgcaaatgacccttctagggcaggccagagtctggttgaatgtcttgaacaggcacttcgggatgtgcccaaagacagatatgccagcactccactctacctgggagctacagcaggcatgcgcctactcaacctgaccagcccagaggccacagccaaggtgctggaggcagtgacacagacgctcacacggtacccctttgacttccgtggtgcccgcatcctctcgggacaggatgaaggggtgtttggctgggtgactgccaactacctgctggagaacttcatcaagtatggctgggtaggccggtggatacggccaaggaagggaactctgggggccatggaccttgggggtgcctcaacacagatcacctttgagacaaccagtccatctgaagatccagataatgaggtccatttgcggctctatggccagcattaccgtgtctacacccatagcttcctctgctatggccgggaccaggttctccagaggcttctggccagtgccctccagatccatcgcttccacccctgctggccaaagggctactccacccaagtgctgctccgggaagtctaccagtctccatgcactatgggtcagcgtccccagaccttcaacagcagtgccactgtcagcctgtcagggaccagcaacgctgccctctgtcgtgacctcgtctctgggctcttcaatatctcctcctgtcccttttcccaatgctccttcaatggggttttccagcctcccgtggctgggaacttcatagccttttctgctttctactatactgtagacttcctgaagacagtgatggggctgcctgtgggaaccctgaagcagctggaggatgccacagagaccacctgcaaccagacctgggctgagcttcaggcccgagtacccggacagcagacccgcctgcctgactactgcgctgtagccatgttcatacatcagctattgagccgcggttatcgcttcgacgagcgctctttccgtggagtggtcttcgaaaagaaggcggcagacacggctgtcggctgggcgctgggctacatgctgaatttgaccaacctgattcccgctgacctcccgggactacgtaagggcacccacttcagctcctgggttgctctcctgctgctcttcacagtcctgatcttggcggctttggtcctgctcttgcgccaggtgcgctctgccaagtccccaggcgccctc

SEQ ID NO: 347 - protein, 495 aa, Rattus norvegicus
MAGKLVSLVPPLLLAAAGLAGLLLLCVPTQDVREPPALKYGIVLDAGSSHTSMFVYKWPADKENDTGIVGQHSSCDVQGGGISSYANDPSKAGQSLVRCLEQALRDVPRDRHASTPLYLGATAGMRLLNLTSPEATARVLEAVTQTLTQYPFDFRGARILSGQDEGVFGWVTANYLLENFIKYGWVGRWIRPRKGTLGAMDLGGASTQITFETTSPSEDPGNEVHLRLYGQHYRVYTHSFLCYGRDQILLRLLASALQIHRFHPCWPKGYSTQVLLQEVYQSPCTMGQRPRAFNGSAIVSLSGTSNATLCRDLVSRLFNISSCPFSQCSFNGVFQPPVTGNFIAFSAFYYTVDFLTTVMGLPVGTLKQLEEATEITCNQTWTELQARVPGQKTRLADYCAVAMFIHQLLSRGYHFDERSFREVVFQKKAADTAVGWALGYMLNFTNLIPADLPGLRKGTHFSSWVALLLLFTVLILAALVLLLRQVRSAKSPGAL

SEQ ID NO: 348 - DNA, 1485 bp, Rattus norvegicus
atggctggaaagttggtgtcactggtgccacccctgctgctggctgccgcgggcctcgccggcctcctgctactgtgcgtccctacccaagacgtccgggagccgcccgccctcaagtatggcatcgttctggatgctggctcttcacacacatccatgtttgtctacaagtggccagcggacaaggaaaatgacacaggtatcgtgggccagcacagctcctgcgatgtgcagggcggcggcatttccagctatgccaacgacccctccaaagccggacagtccctggtcaggtgcctggagcaggccctgagagacgtccccagagacagacacgcgagcacccctctgtatctcggcgccacagccggcatgaggctgctgaacctgacctcccctgaggccacagccagagtcctggaggctgtcacccagaccctgacacagtaccccttcgactttaggggcgccagaatactgtccggccaggatgaaggcgtgttcggctgggtgacagccaactacctgctggagaactttattaagtacggctgggtgggcagatggatcaggcccaggaagggcaccctgggagccatggatctcggcggagcctccacccagatcacctttgagaccaccagcccctccgaagacccgggcaatgaggtccacctgaggctgtacggccagcactatagagtctacacccacagcttcctgtgctacggcagagatcaaatcctgctgagactgctcgcttccgccctgcagattcataggtttcacccctgctggcccaaaggctacagcacccaggtgctgctccaagaggtgtaccagagcccttgcaccatgggacagagacccagggctttcaacggaagcgccatcgtgtccctcagcggcaccagcaacgccaccctgtgtagggacctcgtgagcagactgttcaacatctcctcctgccctttcagccagtgttccttcaatggcgtgtttcagccccctgtgacaggcaacttcatcgccttcagcgctttctactacaccgtggactttctcacaaccgtcatgggcctgcccgtgggaaccctgaagcaactggaggaagccaccgagatcacctgcaaccagacctggaccgaactgcaagccagggtgcccggccagaagaccagactggccgactactgtgctgtcgccatgttcattcaccaactgctgagcaggggctaccacttcgatgaaaggagcttcagggaggtggtgttccagaagaaggccgccgataccgctgtgggctgggctctgggctacatgctcaacttcaccaacctgatccccgccgatctccccggactgaggaagggaacccacttcagctcctgggttgctctcctgctgctcttcacagtcctgatcttggcggctttggtcctgctcttgcgccaggtgcgctctgccaagtccccaggcgccctc

SEQ ID NO: 349 - protein, 510 aa, Homo sapiens
MEDTKESNVKTFCSKNILAILGFSSIIAVIALLAVGLTQNKALPENVKYGIVLDAGSSHTSLYIYKWPAEKENDTGVVHQVEECRVKGPGISKFVQKVNEIGIYLTDCMERAREVIPRSQHQETPVYLGATAGMRLLRMESEELADRVLDVVERSLSNYPFDFQGARIITGQEEGAYGWITINYLLGKFSQKTRWFSIVPYETNNQETFGALDLGGASTQVTFVPQNQTIESPDNALQFRLYGKDYNVYTHSFLCYGKDQALWQKLAKDIQVASNEILRDPCFHPGYKKVVNVSDLYKTPCTKRFEMTLPFQQFEIQGIGNYQQCHQSILELFNTSYCPYSQCAFNGIFLPPLQGDFGAFSAFYFVMKFLNLTSEKVSQEKVTEMMKKFCAQPWEEIKTSYAGVKEKYLSEYCFSGTYILSLLLQGYHFTADSWEHIHFIGKIQGSDAGWTLGYMLNLTNMIPAEQPLSTPLSHSTYVFLMVLFSLVLFTVAIIGLLIFHKPSYFWKDMV

SEQ ID NO: 350 - DNA, 1530 bp, Homo sapiens
atggaagatacaaaggagtctaacgtgaagacattttgctccaagaatatcctagccatccttggcttctcctctatcatagctgtgatagctttgcttgctgtggggttgacccagaacaaagcattgccagaaaacgttaagtatgggattgtgctggatgcgggttcttctcacacaagtttatacatctataagtggccagcagaaaaggagaatgacacaggcgtggtgcatcaagtagaagaatgcagggttaaaggtcctggaatctcaaaatttgttcagaaagtaaatgaaataggcatttacctgactgattgcatggaaagagctagggaagtgattccaaggtcccagcaccaagagacacccgtttacctgggagccacggcaggcatgcggttgctcaggatggaaagtgaagagttggcagacagggttctggatgtggtggagaggagcctcagcaactacccctttgacttccagggtgccaggatcattactggccaagaggaaggtgcctatggctggattactatcaactatctgctgggcaaattcagtcagaaaacaaggtggttcagcatagtcccatatgaaaccaataatcaggaaacctttggagctttggaccttgggggagcctctacacaagtcacttttgtaccccaaaaccagactatcgagtccccagataatgctctgcaatttcgcctctatggcaaggactacaatgtctacacacatagcttcttgtgctatgggaaggatcaggcactctggcagaaactggccaaggacattcaggttgcaagtaatgaaattctcagggacccatgctttcatcctggatataagaaggtagtgaacgtaagtgacctttacaagaccccctgcaccaagagatttgagatgactcttccattccagcagtttgaaatccagggtattggaaactatcaacaatgccatcaaagcatcctggagctcttcaacaccagttactgcccttactcccagtgtgccttcaatgggattttcttgccaccactccagggggattttggggcattttcagctttttactttgtgatgaagtttttaaacttgacatcagagaaagtctctcaggaaaaggtgactgagatgatgaaaaagttctgtgctcagccttgggaggagataaaaacatcttacgctggagtaaaggagaagtacctgagtgaatactgcttttctggtacctacattctctccctccttctgcaaggctatcatttcacagctgattcctgggagcacatccatttcattggcaagatccagggcagcgacgccggctggactttgggctacatgctgaacctgaccaacatgatcccagctgagcaaccattgtccacacctctctcccactccacctatgtcttcctcatggttctattctccctggtccttttcacagtggccatcataggcttgcttatctttcacaagccttcatatttctggaaagatatggta

SEQ ID NO: 351 - protein, 510 aa, Mus musculus
MEDIKDSKVKRFCSKNILIILGFTSILAVIALIAVGLTQNKPLPENVKYGIVLDAGSSHTNLYIYKWPAEKENDTGVVQQLEECQVKGPGISKYAQKTDEIGAYLAECMELSTELIPTSKHHQTPVYLGATAGMRLLRMESEQSADEVLAAVSTSLKSYPFDFQGAKIITGQEEGAYGWITINYLLGRFTQEQSWLSLISDSQKQETFGALDLGGASTQITFVPQNSTIESPENSLQFRLYGEDYTVYTHSFLCYGKDQALWQKLAKDIQVSSGGVLKDPCFNPGYEKVVNVSELYGTPCTKRFEKKLPFDQFRIQGTGDYEQCHQSILELFNNSHCPYSQCAFNGVFLPPLHGSFGAFSAFYFVMDFFKKVAKNSVISQEKMTEITKNFCSKSWEETKTSYPSVKEKYLSEYCFSGAYILSLLQGYNFTDSSWEQIHFMGKIKDSNAGWTLGYMLNLTNMIPAEQPLSPPLPHSTYIGLMVLFSLLLVAVAITGLFIYSKPSYFWKEAV

SEQ ID NO: 352 - DNA, 1530 bp, Mus musculus
atggaagatataaaggattctaaggtgaagagattttgctccaaaaatattctgatcatccttggtttcacctctatcttggctgtgatagctttgattgctgtgggactgacccagaacaaacctttgccagaaaatgttaagtatgggattgtgttggatgcggggtcatctcacaccaacctgtacatctacaagtggccggccgagaaggagaatgacacaggggtggtgcagcagttagaggaatgccaagtgaaaggtcctggaatctcaaaatatgctcagaaaacagatgaaatcggtgcgtacctggccgaatgcatggaactgtccaccgaactgataccaacatccaagcatcaccagactcctgtctacctgggagccacagcaggcatgcgcttgcttagaatggaaagcgaacaatcggcagacgaggtcctggctgcagtgtcaacaagccttaagagctacccctttgacttccagggtgccaagatcatcactggacaagaggaaggtgcctatgggtggattactattaactatctgctgggcagattcactcaggaacagagttggctaagcctcatctcagacagtcagaaacaggaaacctttggcgctttggatctcggcggagcctccacacagatcaccttcgtgccccaaaacagcactatagagtccccagaaaactctctgcaattccgtctctatggcgaggactatactgtgtacacacacagcttcctgtgctatgggaaggatcaggctctctggcagaaactggccaaggacattcaggtttcaagtggtggcgtccttaaggacccatgctttaacccaggatacgagaaggttgtgaatgtaagtgagctctatggcactccctgcaccaaaagattcgaaaagaagctaccatttgatcagtttcgaatccagggcactggagactacgaacagtgccaccagagcatccttgagctcttcaacaacagccactgcccttactcccagtgtgccttcaatggcgtcttcctgccacctctccatgggagttttggggcgttttctgctttctactttgtgatggatttttttaagaaggtagcgaaaaacagtgtcatctctcaggagaaaatgaccgagataacaaaaaatttttgctcaaaatcttgggaagagacaaagacatcttatccttcagtaaaggagaagtacctgagtgagtactgcttctcgggcgcctacatcctctctctcctgcaaggctataacttcacagacagctcctgggaacagattcattttatgggcaagatcaaagacagcaacgcggggtggactttgggctacatgctgaacttgaccaacatgatcccagctgaacagccgttgtccccgcctctccctcactccacctacatcggcctcatggttctcttctccctgctcttggttgctgtggccatcacaggcctgttcatctatagcaagccttcatatttctggaaagaggcagta

SEQ ID NO: 353 - DNA, 18 bp, Artificial Sequence
  source: /note="Description of Artificial Sequence: Synthetic oligonucleotide"
gactatagctacccctac

SEQ ID NO: 354 - protein, 440 aa, Artificial Sequence
  source: /note="Description of Artificial Sequence: Synthetic polypeptide"
QVQLVESGGGVVQPGRSLRLDCKASGITFSNSGMHWVRQAPGKGLEWVAVIWYDGSKRYYADSVKGRFTISRDNSKNTLFLQMNSLRAEDTAVYYCATNDDYWGQGTLVTVSSASTKGPSVFPLAPCSRSTSESTAALGCLVKDYFPEPVTVSWNSGALTSGVHTFPAVLQSSGLYSLSSVVTVPSSSLGTKTYTCNVDHKPSNTKVDKRVESKYGPPCPPCPAPEFLGGPSVFLFPPKPKDTLMISRTPEVTCVVVDVSQEDPEVQFNWYVDGVEVHNAKTKPREEQFNSTYRVVSVLTVLHQDWLNGKEYKCKVSNKGLPSSIEKTISKAKGQPREPQVYTLPPSQEEMTKNQVSLTCLVKGFYPSDIAVEWESNGQPENNYKTTPPVLDSDGSFFLYSRLTVDKSRWQEGNVFSCSVMHEALHNHYTQKSLSLSLGK

SEQ ID NO: 355 - protein, 214 aa, Artificial Sequence
  source: /note="Description of Artificial Sequence: Synthetic polypeptide"
EIVLTQSPATLSLSPGERATLSCRASQSVSSYLAWYQQKPGQAPRLLIYDASNRATGIPARFSGSGSGTDFTLTISSLEPEDFAVYYCQQSSNWPRTFGQGTKVEIKRTVAAPSVFIFPPSDEQLKSGTASVVCLLNNFYPREAKVQWKVDNALQSGNSQESVTEQDSKDSTYSLSSTLTLSKADYEKHKVYACEVTHQGLSSPVTKSFNRGEC

SEQ ID NO: 356 - protein, 447 aa, Artificial Sequence
  source: /note="Description of Artificial Sequence: Synthetic polypeptide"
QVQLVQSGVEVKKPGASVKVSCKASGYTFTNYYMYWVRQAPGQGLEWMGGINPSNGGTNFNEKFKNRVTLTTDSSTTTAYMELKSLQFDDTAVYYCARRDYRFDMGFDYWGQGTTVTVSSASTKGPSVFPLAPCSRSTSESTAALGCLVKDYFPEPVTVSWNSGALTSGVHTFPAVLQSSGLYSLSSVVTVPSSSLGTKTYTCNVDHKPSNTKVDKRVESKYGPPCPPCPAPEFLGGPSVFLFPPKPKDTLMISRTPEVTCVVVDVSQEDPEVQFNWYVDGVEVHNAKTKPREEQFNSTYRVVSVLTVLHQDWLNGKEYKCKVSNKGLPSSIEKTISKAKGQPREPQVYTLPPSQEEMTKNQVSLTCLVKGFYPSDIAVEWESNGQPENNYKTTPPVLDSDGSFFLYSRLTVDKSRWQEGNVFSCSVMHEALHNHYTQKSLSLSLGK

SEQ ID NO: 357 - protein, 218 aa, Artificial Sequence
  source: /note="Description of Artificial Sequence: Synthetic polypeptide"
EIVLTQSPATLSLSPGERATLSCRASKGVSTSGYSYLHWYQQKPGQAPRLLIYLASYLESGVPARFSGSGSGTDFTLTISSLEPEDFAVYYCQHSRDLPLTFGGGTKVEIKRTVAAPSVFIFPPSDEQLKSGTASVVCLLNNFYPREAKVQWKVDNALQSGNSQESVTEQDSKDSTYSLSSTLTLSKADYEKHKVYACEVTHQGLSSPVTKSFNRGEC

SEQ ID NO: 358 - protein, 447 aa, Artificial Sequence
  source: /note="Description of Artificial Sequence: Synthetic polypeptide"
QVQLVQSGSELKKPGASVKISCKASGYTFTNYGMNWVRQAPGQGLQWMGWINTDSGESTYAEEFKGRFVFSLDTSVNTAYLQITSLTAEDTGMYFCVRVGYDALDYWGQGTLVTVSSASTKGPSVFPLAPSSKSTSGGTAALGCLVKDYFPEPVTVSWNSGALTSGVHTFPAVLQSSGLYSLSSVVTVPSSSLGTQTYICNVNHKPSNTKVDKRVEPKSCDKTHTCPPCPAPELLGGPSVFLFPPKPKDTLMISRTPEVTCVVVDVSHEDPEVKFNWYVDGVEVHNAKTKPREEQYNSTYRVVSVLTVLHQDWLNGKEYKCKVSNKALPAPIEKTISKAKGQPREPQVYTLPPSREEMTKNQVSLTCLVKGFYPSDIAVEWESNGQPENNYKTTPPVLDSDGSFFLYSKLTVDKSRWQQGNVFSCSVMHEALHNHYTQKSLSLSPGK

SEQ ID NO: 359 - protein, 213 aa, Artificial Sequence
  source: /note="Description of Artificial Sequence: Synthetic polypeptide"
EIVLTQSPSSLSASVGDRVTITCSARSSVSYMHWFQQKPGKAPKLWIYRTSNLASGVPSRFSGSGSGTSYCLTINSLQPEDFATYYCQQRSSFPLTFGGGTKLEIKRTVAAPSVFIFPPSDEQLKSGTASVVCLLNNFYPREAKVQWKVDNALQSGNSQESVTEQDSKDSTYSLSSTLTLSKADYEKHKVYACEVTHQGLSSPVTKSFNRGEC

SEQ ID NO: 360 - protein, 10 aa, Artificial Sequence
  source: /note="Description of Artificial Sequence: Synthetic peptide"
GGSISGRYWS

SEQ ID NO: 361 - protein, 16 aa, Artificial Sequence
  source: /note="Description of Artificial Sequence: Synthetic peptide"
YIYGTGSTNYNPSLKS

SEQ ID NO: 362 - protein, 13 aa, Artificial Sequence
  source: /note="Description of Artificial Sequence: Synthetic peptide"
ESQESPYNNWFDP

SEQ ID NO: 363 - protein, 5 aa, Artificial Sequence
  source: /note="Description of Artificial Sequence: Synthetic peptide"
GRYWS

SEQ ID NO: 364 - protein, 7 aa, Artificial Sequence
  source: /note="Description of Artificial Sequence: Synthetic peptide"
GGSISGR

SEQ ID NO: 365 - protein, 5 aa, Artificial Sequence
  source: /note="Description of Artificial Sequence: Synthetic peptide"
YGTGS

SEQ ID NO: 366 - protein, 8 aa, Artificial Sequence
  source: /note="Description of Artificial Sequence: Synthetic peptide"
GGSISGRY

SEQ ID NO: 367 - protein, 7 aa, Artificial Sequence
  source: /note="Description of Artificial Sequence: Synthetic peptide"
IYGTGST

SEQ ID NO: 368 - protein, 15 aa, Artificial Sequence
  source: /note="Description of Artificial Sequence: Synthetic peptide"
ARESQESPYNNWFDP

SEQ ID NO: 369 - protein, 121 aa, Artificial Sequence
  source: /note="Description of Artificial Sequence: Synthetic polypeptide"
QVQLQESGPGLVKPSETLSLTCTVSGGSISGRYWSWIRQPPGKGLEWIGYIYGTGSTNYNPSLKSRVTISVDTSKNQFSLKLSSVTAADTAVYYCARESQESPYNNWFDPWGQGTLVTVSS

SEQ ID NO: 370 - DNA, 363 bp, Artificial Sequence
  source: /note="Description of Artificial Sequence: Synthetic polynucleotide"
caagtgcagctgcaggaatctggccctggcctggtcaagccctccgagacactgtccctgacctgcaccgtgtccggcggctccatctccggccggtactggtcttggatccggcagcctcccggcaagggcctggaatggatcggctacatctacggcaccggctccaccaactacaaccccagcctgaagtccagagtgaccatctccgtggacacctccaagaaccagttctccctgaagctgtcctccgtgaccgccgctgacaccgccgtgtactactgcgccagagagtcccaggaatccccttacaacaattggttcgacccctggggccagggcaccctggtcaccgtgtcctct

SEQ ID NO: 371 - protein, 448 aa, Artificial Sequence
  source: /note="Description of Artificial Sequence: Synthetic polypeptide"
  VARIANT (448)..(448): /replace=" "
  SITE (1)..(448): /note="Variant residues given in the sequence have no preference with respect to those in the annotations for variant positions"
QVQLQESGPGLVKPSETLSLTCTVSGGSISGRYWSWIRQPPGKGLEWIGYIYGTGSTNYNPSLKSRVTISVDTSKNQFSLKLSSVTAADTAVYYCARESQESPYNNWFDPWGQGTLVTVSSASTKGPSVFPLAPCSRSTSESTAALGCLVKDYFPEPVTVSWNSGALTSGVHTFPAVLQSSGLYSLSSVVTVPSSSLGTKTYTCNVDHKPSNTKVDKRVESKYGPPCPPCPAPEFLGGPSVFLFPPKPKDTLMISRTPEVTCVVVDVSQEDPEVQFNWYVDGVEVHNAKTKPREEQFNSTYRVVSVLTVLHQDWLNGKEYKCKVSNKGLPSSIEKTISKAKGQPREPQVYTLPPSQEEMTKNQVSLTCLVKGFYPSDIAVEWESNGQPENNYKTTPPVLDSDGSFFLYSRLTVDKSRWQEGNVFSCSVMHEALHNHYTQKSLSLSLGK

SEQ ID NO: 372 - DNA, 1344 bp, Artificial Sequence
  source: /note="Description of Artificial Sequence: Synthetic polynucleotide"
  variation (1342)..(1344): /replace=" "
  misc_feature (1342)..(1344): /note="This region may or may not be present in its entirety"
  misc_feature (1)..(1344): /note="Variant nucleotides given in the sequence have no preference with respect to those in the annotations for variant positions"
caagtgcagctgcaggaatctggccctggcctggtcaagccctccgagacactgtccctgacctgcaccgtgtccggcggctccatctccggccggtactggtcttggatccggcagcctcccggcaagggcctggaatggatcggctacatctacggcaccggctccaccaactacaaccccagcctgaagtccagagtgaccatctccgtggacacctccaagaaccagttctccctgaagctgtcctccgtgaccgccgctgacaccgccgtgtactactgcgccagagagtcccaggaatccccttacaacaattggttcgacccctggggccagggcaccctggtcaccgtgtcctctgcttccaccaagggcccctccgtgttccctctggccccttgctcccggtccacctccgagtctaccgccgctctgggctgcctcgtgaaggactacttccccgagcccgtgaccgtgtcctggaactctggcgccctgacctccggcgtgcacaccttccctgccgtgctgcagtcctccggcctgtactccctgtccagcgtcgtgaccgtgccctcctccagcctgggcaccaagacctacacctgtaacgtggaccacaagccctccaacaccaaagtggacaagcgggtggaatctaagtacggccctccctgccctccttgccctgcccctgagttcctgggcggaccttccgtgttcctgttccctccaaagcccaaggacaccctgatgatctcccggacccctgaagtgacctgcgtggtggtggacgtgtcccaggaagatcccgaagtccagttcaattggtacgtggacggcgtggaagtgcacaacgccaagaccaagcccagagaggaacagttcaactccacctaccgggtggtgtccgtgctgaccgtgctgcaccaggactggctgaacggcaaagagtacaagtgcaaagtgtccaacaagggcctgccctccagcatcgaaaagaccatctccaaggccaagggccagccccgcgagccccaagtgtacaccctgcctcccagccaggaagagatgaccaagaatcaagtgtccctgacttgtctggtcaagggcttctacccctccgatatcgccgtggagtgggagtccaacggccagcccgagaacaactacaagaccacccctcccgtgctggactccgacggctccttcttcctgtactctcggctgaccgtggacaagtcccggtggcaggaaggcaacgtcttctcctgctccgtgatgcacgaggccctgcacaaccactacacccagaagtccctgtccctgtctctgggcaag

SEQ ID NO: 373 - protein, 11 aa, Artificial Sequence
  source: /note="Description of Artificial Sequence: Synthetic peptide"
RASQGISSWLA

SEQ ID NO: 374 - protein, 7 aa, Artificial Sequence
  source: /note="Description of Artificial Sequence: Synthetic peptide"
AASSLQS

SEQ ID NO: 375 - protein, 9 aa, Artificial Sequence
  source: /note="Description of Artificial Sequence: Synthetic peptide"
QQGNSFPRT

SEQ ID NO: 376 - protein, 7 aa, Artificial Sequence
  source: /note="Description of Artificial Sequence: Synthetic peptide"
SQGISSW

SEQ ID NO: 377 - protein, 3 aa, Artificial Sequence
  source: /note="Description of Artificial Sequence: Synthetic peptide"
AAS

SEQ ID NO: 378 - protein, 6 aa, Artificial Sequence
  source: /note="Description of Artificial Sequence: Synthetic peptide"
GNSFPR

SEQ ID NO: 379 - protein, 6 aa, Artificial Sequence
  source: /note="Description of Artificial Sequence: Synthetic peptide"
QGISSW

SEQ ID NO: 380 - protein, 107 aa, Artificial Sequence
  source: /note="Description of Artificial Sequence: Synthetic polypeptide"
DIQMTQSPSSVSASVGDRVTITCRASQGISSWLAWYQQKPGKAPKLLIYAASSLQSGVPSRFSGSGSGTDFTLTISSLQPEDFATYYCQQGNSFPRTFGGGTKVEIK

SEQ ID NO: 381 - DNA, 321 bp, Artificial Sequence
  source: /note="Description of Artificial Sequence: Synthetic polynucleotide"
gacatccagatgacccagagcccctcctccgtgtccgcctccgtgggcgacagagtgaccatcacctgtcgggcctcccagggcatctccagctggctggcctggtatcagcagaagcccggcaaggcccctaagctgctgatctacgccgcctccagcctgcagtccggcgtgccctccagattctccggctctggctccggcaccgacttcaccctgaccatcagctccctgcagcccgaggacttcgccacctactactgccagcagggcaactccttccctcggaccttcggcggaggcaccaaagtggaaatcaag

SEQ ID NO: 382 - protein, 214 aa, Artificial Sequence
  source: /note="Description of Artificial Sequence: Synthetic polypeptide"
DIQMTQSPSSVSASVGDRVTITCRASQGISSWLAWYQQKPGKAPKLLIYAASSLQSGVPSRFSGSGSGTDFTLTISSLQPEDFATYYCQQGNSFPRTFGGGTKVEIKRTVAAPSVFIFPPSDEQLKSGTASVVCLLNNFYPREAKVQWKVDNALQSGNSQESVTEQDSKDSTYSLSSTLTLSKADYEKHKVYACEVTHQGLSSPVTKSFNRGEC

SEQ ID NO: 383 - DNA, 642 bp, Artificial Sequence
  source: /note="Description of Artificial Sequence: Synthetic polynucleotide"
gacatccagatgacccagagcccctcctccgtgtccgcctccgtgggcgacagagtgaccatcacctgtcgggcctcccagggcatctccagctggctggcctggtatcagcagaagcccggcaaggcccctaagctgctgatctacgccgcctccagcctgcagtccggcgtgccctccagattctccggctctggctccggcaccgacttcaccctgaccatcagctccctgcagcccgaggacttcgccacctactactgccagcagggcaactccttccctcggaccttcggcggaggcaccaaagtggaaatcaagcgtacggtggccgctccctccgtgttcatcttcccaccctccgacgagcagctgaagtccggcaccgcctccgtcgtgtgcctgctgaacaacttctaccctcgcgaggccaaagtgcagtggaaagtggacaacgccctgcagtccggcaactcccaggaatccgtcaccgagcaggactccaaggacagcacctactccctgtcctccaccctgaccctgtccaaggccgactacgagaagcacaaagtgtacgcctgcgaagtgacccaccagggcctgtccagccccgtgaccaagtccttcaaccggggcgagtgc

SEQ ID NO: 384 - protein, 10 aa, Artificial Sequence
  source: /note="Description of Artificial Sequence: Synthetic peptide"
GGSIEGRYWS

SEQ ID NO: 385 - protein, 16 aa, Artificial Sequence
  source: /note="Description of Artificial Sequence: Synthetic peptide"
YIYGSGSTKYNPSLKS

SEQ ID NO: 386 - protein, 7 aa, Artificial Sequence
  source: /note="Description of Artificial Sequence: Synthetic peptide"
GGSIEGR

SEQ ID NO: 387 - protein, 5 aa, Artificial Sequence
  source: /note="Description of Artificial Sequence: Synthetic peptide"
YGSGS

SEQ ID NO: 388 - protein, 8 aa, Artificial Sequence
  source: /note="Description of Artificial Sequence: Synthetic peptide"
GGSIEGRY

SEQ ID NO: 389 - protein, 7 aa, Artificial Sequence
  source: /note="Description of Artificial Sequence: Synthetic peptide"
IYGSGST

SEQ ID NO: 390 - protein, 121 aa, Artificial Sequence
  source: /note="Description of Artificial Sequence: Synthetic polypeptide"
QVQLQESGPGLVKPSETLSLTCTVSGGSIEGRYWSWIRQPPGKGLEWIGYIYGSGSTKYNPSLKSRVTISVDTSKNQFSLKLSSVTAADTAVYYCARESQESPYNNWFDPWGQGTLVTVSS

SEQ ID NO: 391 - DNA, 363 bp, Artificial Sequence
  source: /note="Description of Artificial Sequence: Synthetic polynucleotide"
caagtgcagctgcaggaatctggccctggcctggtcaagccctccgagacactgtccctgacctgcaccgtgtccggcggctctatcgagggccggtactggtcctggatccggcagcctcctggcaagggcctggaatggatcggctacatctacggctccggctccaccaagtacaaccccagcctgaagtccagagtgaccatctccgtggacacctccaagaaccagttctccctgaagctgtcctccgtgaccgccgctgacaccgccgtgtactactgcgccagagagtcccaggaatccccttacaacaattggttcgacccctggggccagggcaccctggtcaccgtgtcctct

SEQ ID NO: 392 - protein, 448 aa, Artificial Sequence
  source: /note="Description of Artificial Sequence: Synthetic polypeptide"
  VARIANT (448)..(448): /replace=" "
  SITE (1)..(448): /note="Variant residues given in the sequence have no preference with respect to those in the annotations for variant positions"
QVQLQESGPGLVKPSETLSLTCTVSGGSIEGRYWSWIRQPPGKGLEWIGYIYGSGSTKYNPSLKSRVTISVDTSKNQFSLKLSSVTAADTAVYYCARESQESPYNNWFDPWGQGTLVTVSSASTKGPSVFPLAPCSRSTSESTAALGCLVKDYFPEPVTVSWNSGALTSGVHTFPAVLQSSGLYSLSSVVTVPSSSLGTKTYTCNVDHKPSNTKVDKRVESKYGPPCPPCPAPEFLGGPSVFLFPPKPKDTLMISRTPEVTCVVVDVSQEDPEVQFNWYVDGVEVHNAKTKPREEQFNSTYRVVSVLTVLHQDWLNGKEYKCKVSNKGLPSSIEKTISKAKGQPREPQVYTLPPSQEEMTKNQVSLTCLVKGFYPSDIAVEWESNGQPENNYKTTPPVLDSDGSFFLYSRLTVDKSRWQEGNVFSCSVMHEALHNHYTQKSLSLSLGK

SEQ ID NO: 393 - DNA, 1344 bp, Artificial Sequence
  source: /note="Description of Artificial Sequence: Synthetic polynucleotide"
  variation (1342)..(1344): /replace=" "
  misc_feature (1342)..(1344): /note="This region may or may not be present in its entirety"
  misc_feature (1)..(1344): /note="Variant nucleotides given in the sequence have no preference with respect to those in the annotations for variant positions"
caagtgcagctgcaggaatctggccctggcctggtcaagccctccgagacactgtccctgacctgcaccgtgtccggcggctctatcgagggccggtactggtcctggatccggcagcctcctggcaagggcctggaatggatcggctacatctacggctccggctccaccaagtacaaccccagcctgaagtccagagtgaccatctccgtggacacctccaagaaccagttctccctgaagctgtcctccgtgaccgccgctgacaccgccgtgtactactgcgccagagagtcccaggaatccccttacaacaattggttcgacccctggggccagggcaccctggtcaccgtgtcctctgcctccaccaagggcccctccgtgttccctctggccccttgctcccggtccacctccgagtctaccgccgctctgggctgcctcgtgaaggactacttccccgagcccgtgaccgtgtcctggaactctggcgccctgacctccggcgtgcacaccttccctgccgtgctgcagtcctccggcctgtactccctgtccagcgtcgtgaccgtgccctcctccagcctgggcaccaagacctacacctgtaacgtggaccacaagccctccaacaccaaagtggacaagcgggtggaatctaagtacggccctccctgccctccttgccctgcccctgagttcctgggcggaccttccgtgttcctgttccctccaaagcccaaggacaccctgatgatctcccggacccctgaagtgacctgcgtggtggtggacgtgtcccaggaagatcccgaagtccagttcaattggtacgtggacggcgtggaagtgcacaacgccaagaccaagcccagagaggaacagttcaactccacctaccgggtggtgtccgtgctgaccgtgctgcaccaggactggctgaacggcaaagagtacaagtgcaaagtgtccaacaagggcctgccctccagcatcgaaaagaccatctccaaggccaagggccagccccgcgagccccaagtgtacaccctgcctcccagccaggaagagatgaccaagaatcaagtgtccctgacttgtctggtcaagggcttctacccctccgatatcgccgtggagtgggagtccaacggccagcccgagaacaactacaagaccacccctcccgtgctggactccgacggctccttcttcctgtactctcggctgaccgtggacaagtcccggtggcaggaaggcaacgtcttctcctgctccgtgatgcacgaggccctgcacaaccactacacccagaagtccctgtccctgtctctgggcaag

SEQ ID NO: 394 - protein, 10 aa, Artificial Sequence
  source: /note="Description of Artificial Sequence: Synthetic peptide"
GFTFHRYAMS

SEQ ID NO: 395 - protein, 17 aa, Artificial Sequence
  source: /note="Description of Artificial Sequence: Synthetic peptide"
AISGSGMNTYYADSVKG

SEQ ID NO: 396 - protein, 15 aa, Artificial Sequence
  source: /note="Description of Artificial Sequence: Synthetic peptide"
GGLYGSGSYLSDFDL

SEQ ID NO: 397 - protein, 5 aa, Artificial Sequence
  source: /note="Description of Artificial Sequence: Synthetic peptide"
RYAMS

SEQ ID NO: 398 - protein, 7 aa, Artificial Sequence
  source: /note="Description of Artificial Sequence: Synthetic peptide"
GFTFHRY

SEQ ID NO: 399 - protein, 6 aa, Artificial Sequence
  source: /note="Description of Artificial Sequence: Synthetic peptide"
SGSGMN

SEQ ID NO: 400 - protein, 8 aa, Artificial Sequence
  source: /note="Description of Artificial Sequence: Synthetic peptide"
GFTFHRYA

SEQ ID NO: 401 - protein, 8 aa, Artificial Sequence
  source: /note="Description of Artificial Sequence: Synthetic peptide"
ISGSGMNT

SEQ ID NO: 402 - protein, 17 aa, Artificial Sequence
  source: /note="Description of Artificial Sequence: Synthetic peptide"
ARGGLYGSGSYLSDFDL

SEQ ID NO: 403 - protein, 124 aa, Artificial Sequence
  source: /note="Description of Artificial Sequence: Synthetic polypeptide"
EVQLLESGGGLVQPGGSLRLSCAASGFTFHRYAMSWVRQAPGKGLEWVSAISGSGMNTYYADSVKGRFTISRDNSKNTLYLQMNSLRAEDTAVYYCARGGLYGSGSYLSDFDLWGRGTLVTVSS

SEQ ID NO: 404 - DNA, 372 bp, Artificial Sequence
  source: /note="Description of Artificial Sequence: Synthetic polynucleotide"
gaagtgcagctgctggaatctggcggcggactggtgcagcctggcggctccctgagactgtcttgcgccgcctccggcttcaccttccacagatacgccatgtcctgggtccgacaggcccctggcaagggcctggagtgggtgtccgccatctccggctccggcatgaacacctactacgccgactccgtgaagggccggttcaccatctcccgggacaactccaagaacaccctgtacctgcagatgaactccctgcgggccgaggacaccgccgtgtactactgtgccagaggcggcctgtacggctccggctcctacctgtccgacttcgacctgtggggcagaggcaccctggtcaccgtgtcctcc

SEQ ID NO: 405 - protein, 451 aa, Artificial Sequence
  source: /note="Description of Artificial Sequence: Synthetic polypeptide"
  VARIANT (451)..(451): /replace=" "
  SITE (1)..(451): /note="Variant residues given in the sequence have no preference with respect to those in the annotations for variant positions"
EVQLLESGGGLVQPGGSLRLSCAASGFTFHRYAMSWVRQAPGKGLEWVSAISGSGMNTYYADSVKGRFTISRDNSKNTLYLQMNSLRAEDTAVYYCARGGLYGSGSYLSDFDLWGRGTLVTVSSASTKGPSVFPLAPCSRSTSESTAALGCLVKDYFPEPVTVSWNSGALTSGVHTFPAVLQSSGLYSLSSVVTVPSSSLGTKTYTCNVDHKPSNTKVDKRVESKYGPPCPPCPAPEFLGGPSVFLFPPKPKDTLMISRTPEVTCVVVDVSQEDPEVQFNWYVDGVEVHNAKTKPREEQFNSTYRVVSVLTVLHQDWLNGKEYKCKVSNKGLPSSIEKTISKAKGQPREPQVYTLPPSQEEMTKNQVSLTCLVKGFYPSDIAVEWESNGQPENNYKTTPPVLDSDGSFFLYSRLTVDKSRWQEGNVFSCSVMHEALHNHYTQKSLSLSLGK

SEQ ID NO: 406 - DNA, 1353 bp, Artificial Sequence
  source: /note="Description of Artificial Sequence: Synthetic polynucleotide"
  variation (1351)..(1353): /replace=" "
  misc_feature (1351)..(1353): /note="This region may or may not be present in its entirety"
  misc_feature (1)..(1353): /note="Variant nucleotides given in the sequence have no preference with respect to those in the annotations for variant positions"
gaagtgcagctgctggaatctggcggcggactggtgcagcctggcggctccctgagactgtcttgcgccgcctccggcttcaccttccacagatacgccatgtcctgggtccgacaggcccctggcaagggcctggagtgggtgtccgccatctccggctccggcatgaacacctactacgccgactccgtgaagggccggttcaccatctcccgggacaactccaagaacaccctgtacctgcagatgaactccctgcgggccgaggacaccgccgtgtactactgtgccagaggcggcctgtacggctccggctcctacctgtccgacttcgacctgtggggcagaggcaccctggtcaccgtgtcctccgcctccacaaagggcccctccgtgttccctctggccccttgctcccggtccacctccgagtctaccgccgctctgggctgcctcgtgaaggactacttccccgagcccgtgaccgtgtcctggaactctggcgccctgacctccggcgtgcacaccttccctgccgtgctgcagtcctccggcctgtactccctgtccagcgtcgtgaccgtgccctcctccagcctgggcaccaagacctacacctgtaacgtggaccacaagccctccaacaccaaagtggacaagcgggtggaatctaagtacggccctccctgccctccttgccctgcccctgagttcctgggcggaccttccgtgttcctgttccctccaaagcccaaggacaccctgatgatctcccggacccctgaagtgacctgcgtggtggtggacgtgtcccaggaagatcccgaagtccagttcaattggtacgtggacggcgtggaagtgcacaacgccaagaccaagcccagagaggaacagttcaactccacctaccgggtggtgtccgtgctgaccgtgctgcaccaggactggctgaacggcaaagagtacaagtgcaaagtgtccaacaagggcctgccctccagcatcgaaaagaccatctccaaggccaagggccagccccgcgagccccaagtgtacaccctgcctcccagccaggaagagatgaccaagaatcaagtgtccctgacttgtctggtcaagggcttctacccctccgatatcgccgtggagtgggagtccaacggccagcccgagaacaactacaagaccacccctcccgtgctggactccgacggctccttcttcctgtactctcggctgaccgtggacaagtcccggtggcaggaaggcaacgtcttctcctgctccgtgatgcacgaggccctgcacaaccactacacccagaagtccctgtccctgtctctgggcaag

SEQ ID NO: 407 - protein, 11 aa, Artificial Sequence
  source: /note="Description of Artificial Sequence: Synthetic peptide"
RASQSVGSNLA

SEQ ID NO: 408 - protein, 7 aa, Artificial Sequence
  source: /note="Description of Artificial Sequence: Synthetic peptide"
GASTRAT

SEQ ID NO: 409 - protein, 9 aa, Artificial Sequence
  source: /note="Description of Artificial Sequence: Synthetic peptide"
QQHNAFPYT

SEQ ID NO: 410 - protein, 7 aa, Artificial Sequence
  source: /note="Description of Artificial Sequence: Synthetic peptide"
SQSVGSN

SEQ ID NO: 411 - protein, 3 aa, Artificial Sequence
  source: /note="Description of Artificial Sequence: Synthetic peptide"
GAS

SEQ ID NO: 412 - protein, 6 aa, Artificial Sequence
  source: /note="Description of Artificial Sequence: Synthetic peptide"
HNAFPY

SEQ ID NO: 413 - protein, 6 aa, Artificial Sequence
  source: /note="Description of Artificial Sequence: Synthetic peptide"
QSVGSN

SEQ ID NO: 414 - protein, 107 aa, Artificial Sequence
  source: /note="Description of Artificial Sequence: Synthetic polypeptide"
EIVLTQSPATLSVSPGERATLSCRASQSVGSNLAWYQQKPGQAPRLLIYGASTRATGIPARFSGSGSGTEFTLTISSLQSEDFAVYYCQQHNAFPYTFGGGTKVEIK

SEQ ID NO: 415 - DNA, 321 bp, Artificial Sequence
  source: /note="Description of Artificial Sequence: Synthetic polynucleotide"
gagatcgtgctgacacagtcccctgccaccctgtctgtgtctcccggcgagagagccaccctgagctgcagagcctcccagtccgtgggctccaacctggcctggtatcagcagaagcccggccaggcccctcggctgctgatctacggcgcctctaccagagccaccggcatccctgccagattctccggctctggctccggcaccgagttcaccctgaccatctccagcctgcagtccgaggacttcgccgtgtactactgccagcagcacaacgccttcccttacaccttcggcggaggcaccaaagtggaaatcaag

SEQ ID NO: 416 - protein, 214 aa, Artificial Sequence
  source: /note="Description of Artificial Sequence: Synthetic polypeptide"
EIVLTQSPATLSVSPGERATLSCRASQSVGSNLAWYQQKPGQAPRLLIYGASTRATGIPARFSGSGSGTEFTLTISSLQSEDFAVYYCQQHNAFPYTFGGGTKVEIKRTVAAPSVFIFPPSDEQLKSGTASVVCLLNNFYPREAKVQWKVDNALQSGNSQESVTEQDSKDSTYSLSSTLTLSKADYEKHKVYACEVTHQGLSSPVTKSFNRGEC

SEQ ID NO: 417 - DNA, 642 bp, Artificial Sequence
  source: /note="Description of Artificial Sequence: Synthetic polynucleotide"
gagatcgtgctgacacagtcccctgccaccctgtctgtgtctcccggcgagagagccaccctgagctgcagagcctcccagtccgtgggctccaacctggcctggtatcagcagaagcccggccaggcccctcggctgctgatctacggcgcctctaccagagccaccggcatccctgccagattctccggctctggctccggcaccgagttcaccctgaccatctccagcctgcagtccgaggacttcgccgtgtactactgccagcagcacaacgccttcccttacaccttcggcggaggcaccaaagtggaaatcaagcgtacggtggccgctccctccgtgttcatcttcccaccctccgacgagcagctgaagtccggcaccgcctccgtcgtgtgcctgctgaacaacttctaccctcgcgaggccaaagtgcagtggaaagtggacaacgccctgcagtccggcaactcccaggaatccgtcaccgagcaggactccaaggacagcacctactccctgtcctccaccctgaccctgtccaaggccgactacgagaagcacaaagtgtacgcctgcgaagtgacccaccagggcctgtccagccccgtgaccaagtccttcaaccggggcgagtgc

SEQ ID NO: 418 - protein, 10 aa, Artificial Sequence
  source: /note="Description of Artificial Sequence: Synthetic peptide"
GGSIERYYWS

SEQ ID NO: 419 - protein, 16 aa, Artificial Sequence
  source: /note="Description of Artificial Sequence: Synthetic peptide"
YIYGRGSTNYNPSLKS

SEQ ID NO: 420 - protein, 5 aa, Artificial Sequence
  source: /note="Description of Artificial Sequence: Synthetic peptide"
RYYWS

SEQ ID NO: 421 - protein, 7 aa, Artificial Sequence
  source: /note="Description of Artificial Sequence: Synthetic peptide"
GGSIERY

SEQ ID NO: 422 - protein, 5 aa, Artificial Sequence
  source: /note="Description of Artificial Sequence: Synthetic peptide"
YGRGS

SEQ ID NO: 423 - protein, 8 aa, Artificial Sequence
  source: /note="Description of Artificial Sequence: Synthetic peptide"
GGSIERYY

SEQ ID NO: 424 - protein, 7 aa, Artificial Sequence
  source: /note="Description of Artificial Sequence: Synthetic peptide"
IYGRGST

SEQ ID NO: 425 - protein, 121 aa, Artificial Sequence
  source: /note="Description of Artificial Sequence: Synthetic polypeptide"
QVQLQESGPGLVKPSETLSLTCTVSGGSIERYYWSWIRQPPGKGLEWIGYIYGRGSTNYNPSLKSRVTISVDTSKNQFSLKLSSVTAADTAVYYCARESQESPYNNWFDPWGQGTLVTVSS

SEQ ID NO: 426 - DNA, 363 bp, Artificial Sequence
  source: /note="Description of Artificial Sequence: Synthetic polynucleotide"
caagtgcagctgcaggaatctggccctggcctggtcaagccctccgagacactgtccctgacctgcaccgtgtccggcggctccatcgagcggtactactggtcctggatccggcagcctcccggcaagggcctggaatggatcggctacatctacggcagaggctccaccaactacaaccccagcctgaagtccagagtgaccatctccgtggacacctccaagaaccagttctccctgaagctgtcctccgtgaccgccgctgacaccgccgtgtactactgcgccagagagtcccaggaatccccttacaacaattggttcgacccctggggccagggcaccctggtcaccgtgtcctct

SEQ ID NO: 427 - protein, 448 aa, Artificial Sequence
  source: /note="Description of Artificial Sequence: Synthetic polypeptide"
  VARIANT (448)..(448): /replace=" "
  SITE (1)..(448): /note="Variant residues given in the sequence have no preference with respect to those in the annotations for variant positions"
QVQLQESGPGLVKPSETLSLTCTVSGGSIERYYWSWIRQPPGKGLEWIGYIYGRGSTNYNPSLKSRVTISVDTSKNQFSLKLSSVTAADTAVYYCARESQESPYNNWFDPWGQGTLVTVSSASTKGPSVFPLAPCSRSTSESTAALGCLVKDYFPEPVTVSWNSGALTSGVHTFPAVLQSSGLYSLSSVVTVPSSSLGTKTYTCNVDHKPSNTKVDKRVESKYGPPCPPCPAPEFLGGPSVFLFPPKPKDTLMISRTPEVTCVVVDVSQEDPEVQFNWYVDGVEVHNAKTKPREEQFNSTYRVVSVLTVLHQDWLNGKEYKCKVSNKGLPSSIEKTISKAKGQPREPQVYTLPPSQEEMTKNQVSLTCLVKGFYPSDIAVEWESNGQPENNYKTTPPVLDSDGSFFLYSRLTVDKSRWQEGNVFSCSVMHEALHNHYTQKSLSLSLGK

SEQ ID NO: 428 - DNA, 1344 bp, Artificial Sequence
  source: /note="Description of Artificial Sequence: Synthetic polynucleotide"
  variation (1342)..(1344): /replace=" "
  misc_feature (1342)..(1344): /note="This region may or may not be present in its entirety"
  misc_feature (1)..(1344): /note="Variant nucleotides given in the sequence have no preference with respect to those in the annotations for variant positions"
caagtgcagctgcaggaatctggccctggcctggtcaagccctccgagacactgtccctgacctgcaccgtgtccggcggctccatcgagcggtactactggtcctggatccggcagcctcccggcaagggcctggaatggatcggctacatctacggcagaggctccaccaactacaaccccagcctgaagtccagagtgaccatctccgtggacacctccaagaaccagttctccctgaagctgtcctccgtgaccgccgctgacaccgccgtgtactactgcgccagagagtcccaggaatccccttacaacaattggttcgacccctggggccagggcaccctggtcaccgtgtcctctgcctccaccaagggcccctccgtgttccctctggccccttgctcccggtccacctccgagtctaccgccgctctgggctgcctcgtgaaggactacttccccgagcccgtgaccgtgtcctggaactctggcgccctgacctccggcgtgcacaccttccctgccgtgctgcagtcctccggcctgtactccctgtccagcgtcgtgaccgtgccctcctccagcctgggcaccaagacctacacctgtaacgtggaccacaagccctccaacaccaaagtggacaagcgggtggaatctaagtacggccctccctgccctccttgccctgcccctgagttcctgggcggaccttccgtgttcctgttccctccaaagcccaaggacaccctgatgatctcccggacccctgaagtgacctgcgtggtggtggacgtgtcccaggaagatcccgaagtccagttcaattggtacgtggacggcgtggaagtgcacaacgccaagaccaagcccagagaggaacagttcaactccacctaccgggtggtgtccgtgctgaccgtgctgcaccaggactggctgaacggcaaagagtacaagtgcaaagtgtccaacaagggcctgccctccagcatcgaaaagaccatctccaaggccaagggccagccccgcgagccccaagtgtacaccctgcctcccagccaggaagagatgaccaagaatcaagtgtccctgacttgtctggtcaagggcttctacccctccgatatcgccgtggagtgggagtccaacggccagcccgagaacaactacaagaccacccctcccgtgctggactccgacggctccttcttcctgtactctcggctgaccgtggacaagtcccggtggcaggaaggcaacgtcttctcctgctccgtgatgcacgaggccctgcacaaccactacacccagaagtccctgtccctgtctctgggcaag

SEQ ID NO: 429 - protein, 10 aa, Artificial Sequence
  source: /note="Description of Artificial Sequence: Synthetic peptide"
GFTFSYNAMS

SEQ ID NO: 430 - protein, 17 aa, Artificial Sequence
  source: /note="Description of Artificial Sequence: Synthetic peptide"
SISGTGGSTYYADSVKG

SEQ ID NO: 431 - protein, 5 aa, Artificial Sequence
  source: /note="Description of Artificial Sequence: Synthetic peptide"
YNAMS

SEQ ID NO: 432 - protein, 7 aa, Artificial Sequence
  source: /note="Description of Artificial Sequence: Synthetic peptide"
GFTFSYN

SEQ ID NO: 433 - protein, 6 aa, Artificial Sequence
  source: /note="Description of Artificial Sequence: Synthetic peptide"
SGTGGS

SEQ ID NO: 434 - protein, 8 aa, Artificial Sequence
  source: /note="Description of Artificial Sequence: Synthetic peptide"
GFTFSYNA

SEQ ID NO: 435 - protein, 8 aa, Artificial Sequence
  source: /note="Description of Artificial Sequence: Synthetic peptide"
ISGTGGST

SEQ ID NO: 436 - protein, 124 aa, Artificial Sequence
  source: /note="Description of Artificial Sequence: Synthetic polypeptide"
EVQLLESGGGLVQPGGSLRLSCAASGFTFSYNAMSWVRQAPGKGLEWVSSISGTGGSTYYADSVKGRFTISRDNSKNTLYLQMNSLRAEDTAVYYCARGGLYGSGSYLSDFDLWGRGTLVTVSS

SEQ ID NO: 437 - DNA, 372 bp, Artificial Sequence
  source: /note="Description of Artificial Sequence: Synthetic polynucleotide"
gaagtgcagctgctggaatctggcggcggactggtgcagcctggcggctccctgagactgtcttgcgccgcctccggcttcaccttctcctacaacgccatgtcctgggtccgacaggcccctggcaagggcctggagtgggtgtcctccatctccggcaccggcggctccacctactacgccgactctgtgaagggccggttcaccatctcccgggacaactccaagaacaccctgtacctgcagatgaactccctgcgggccgaggacaccgccgtgtactactgtgccagaggcggcctgtacggctccggctcctacctgtccgacttcgacctgtggggcagaggcaccctggtcaccgtgtcctcc

SEQ ID NO: 438 - protein, 451 aa, Artificial Sequence
  source: /note="Description of Artificial Sequence: Synthetic polypeptide"
  VARIANT (451)..(451): /replace=" "
  SITE (1)..(451): /note="Variant residues given in the sequence have no preference with respect to those in the annotations for variant positions"
EVQLLESGGGLVQPGGSLRLSCAASGFTFSYNAMSWVRQAPGKGLEWVSSISGTGGSTYYADSVKGRFTISRDNSKNTLYLQMNSLRAEDTAVYYCARGGLYGSGSYLSDFDLWGRGTLVTVSSASTKGPSVFPLAPCSRSTSESTAALGCLVKDYFPEPVTVSWNSGALTSGVHTFPAVLQSSGLYSLSSVVTVPSSSLGTKTYTCNVDHKPSNTKVDKRVESKYGPPCPPCPAPEFLGGPSVFLFPPKPKDTLMISRTPEVTCVVVDVSQEDPEVQFNWYVDGVEVHNAKTKPREEQFNSTYRVVSVLTVLHQDWLNGKEYKCKVSNKGLPSSIEKTISKAKGQPREPQVYTLPPSQEEMTKNQVSLTCLVKGFYPSDIAVEWESNGQPENNYKTTPPVLDSDGSFFLYSRLTVDKSRWQEGNVFSCSVMHEALHNHYTQKSLSLSLGK

SEQ ID NO: 439 - DNA, 1353 bp, Artificial Sequence
  source: /note="Description of Artificial Sequence: Synthetic polynucleotide"
  variation (1351)..(1353): /replace=" "
  misc_feature (1351)..(1353): /note="This region may or may not be present in its entirety"
  misc_feature (1)..(1353): /note="Variant nucleotides given in the sequence have no preference with respect to those in the annotations for variant positions"
gaagtgcagctgctggaatctggcggcggactggtgcagcctggcggctccctgagactgtcttgcgccgcctccggcttcaccttctcctacaacgccatgtcctgggtccgacaggcccctggcaagggcctggagtgggtgtcctccatctccggcaccggcggctccacctactacgccgactctgtgaagggccggttcaccatctcccgggacaactccaagaacaccctgtacctgcagatgaactccctgcgggccgaggacaccgccgtgtactactgtgccagaggcggcctgtacggctccggctcctacctgtccgacttcgacctgtggggcagaggcaccctggtcaccgtgtcctccgcctccacaaagggcccctccgtgttccctctggccccttgctcccggtccacctccgagtctaccgccgctctgggctgcctcgtgaaggactacttccccgagcccgtgaccgtgtcctggaactctggcgccctgacctccggcgtgcacaccttccctgccgtgctgcagtcctccggcctgtactccctgtccagcgtcgtgaccgtgccctcctccagcctgggcaccaagacctacacctgtaacgtggaccacaagccctccaacaccaaagtggacaagcgggtggaatctaagtacggccctccctgccctccttgccctgcccctgagttcctgggcggaccttccgtgttcctgttccctccaaagcccaaggacaccctgatgatctcccggacccctgaagtgacctgcgtggtggtggacgtgtcccaggaagatcccgaagtccagttcaattggtacgtggacggcgtggaagtgcacaacgccaagaccaagcccagagaggaacagttcaactccacctaccgggtggtgtccgtgctgaccgtgctgcaccaggactggctgaacggcaaagagtacaagtgcaaagtgtccaacaagggcctgccctccagcatcgaaaagaccatctccaaggccaagggccagccccgcgagccccaagtgtacaccctgcctcccagccaggaagagatgaccaagaatcaagtgtccctgacttgtctggtcaagggcttctacccctccgatatcgccgtggagtgggagtccaacggccagcccgagaacaactacaagaccacccctcccgtgctggactccgacggctccttcttcctgtactctcggctgaccgtggacaagtcccggtggcaggaaggcaacgtcttctcctgctccgtgatgcacgaggccctgcacaaccactacacccagaagtccctgtccctgtctctgggcaag

SEQ ID NO: 440 - protein, 10 aa, Artificial Sequence
  source: /note="Description of Artificial Sequence: Synthetic peptide"
GFTFSRYAMS

SEQ ID NO: 441 - protein, 7 aa, Artificial Sequence
  source: /note="Description of Artificial Sequence: Synthetic peptide"
GFTFSRY

SEQ ID NO: 442 - protein, 8 aa, Artificial Sequence
  source: /note="Description of Artificial Sequence: Synthetic peptide"
GFTFSRYA

SEQ ID NO: 443 - protein, 124 aa, Artificial Sequence
  source: /note="Description of Artificial Sequence: Synthetic polypeptide"
EVQLLESGGGLVQPGGSLRLSCAASGFTFSRYAMSWVRQAPGKGLEWVSSISGTGGSTYYADSVKGRFTISRDNSKNTLYLQMNSLRAEDTAVYYCARGGLYGSGSYLSDFDLWGRGTLVTVSS

SEQ ID NO: 444 - DNA, 372 bp, Artificial Sequence
  source: /note="Description of Artificial Sequence: Synthetic polynucleotide"
gaagtgcagctgctggaatctggcggcggactggtgcagcctggcggctccctgagactgtcttgcgccgcctccggcttcaccttctccagatacgccatgtcctgggtccgacaggcccctggcaagggcctggagtgggtgtcctccatctccggcaccggcggctccacctactacgccgactctgtgaagggccggttcaccatctcccgggacaactccaagaacaccctgtacctgcagatgaactccctgcgggccgaggacaccgccgtgtactactgtgccagaggcggcctgtacggctccggctcctacctgtccgacttcgacctgtggggcagaggcaccctggtcaccgtgtcctcc

SEQ ID NO: 445 - protein, 451 aa, Artificial Sequence
  source: /note="Description of Artificial Sequence: Synthetic polypeptide"
  VARIANT (451)..(451): /replace=" "
  SITE (1)..(451): /note="Variant residues given in the sequence have no preference with respect to those in the annotations for variant positions"
EVQLLESGGGLVQPGGSLRLSCAASGFTFSRYAMSWVRQAPGKGLEWVSSISGTGGSTYYADSVKGRFTISRDNSKNTLYLQMNSLRAEDTAVYYCARGGLYGSGSYLSDFDLWGRGTLVTVSSASTKGPSVFPLAPCSRSTSESTAALGCLVKDYFPEPVTVSWNSGALTSGVHTFPAVLQSSGLYSLSSVVTVPSSSLGTKTYTCNVDHKPSNTKVDKRVESKYGPPCPPCPAPEFLGGPSVFLFPPKPKDTLMISRTPEVTCVVVDVSQEDPEVQFNWYVDGVEVHNAKTKPREEQFNSTYRVVSVLTVLHQDWLNGKEYKCKVSNKGLPSSIEKTISKAKGQPREPQVYTLPPSQEEMTKNQVSLTCLVKGFYPSDIAVEWESNGQPENNYKTTPPVLDSDGSFFLYSRLTVDKSRWQEGNVFSCSVMHEALHNHYTQKSLSLSLGK

SEQ ID NO: 446 - DNA, 1353 bp, Artificial Sequence
  source: /note="Description of Artificial Sequence: Synthetic polynucleotide"
  variation (1351)..(1353): /replace=" "
  misc_feature (1351)..(1353): /note="This region may or may not be present in its entirety"
  misc_feature (1)..(1353): /note="Variant nucleotides given in the sequence have no preference with respect to those in the annotations for variant positions"
gaagtgcagctgctggaatctggcggcggactggtgcagcctggcggctccctgagactgtcttgcgccgcctccggcttcaccttctccagatacgccatgtcctgggtccgacaggcccctggcaagggcctggagtgggtgtcctccatctccggcaccggcggctccacctactacgccgactctgtgaagggccggttcaccatctcccgggacaactccaagaacaccctgtacctgcagatgaactccctgcgggccgaggacaccgccgtgtactactgtgccagaggcggcctgtacggctccggctcctacctgtccgacttcgacctgtggggcagaggcaccctggtcaccgtgtcctccgcctccacaaagggcccctccgtgttccctctggccccttgctcccggtccacctccgagtctaccgccgctctgggctgcctcgtgaaggactacttccccgagcccgtgaccgtgtcctggaactctggcgccctgacctccggcgtgcacaccttccctgccgtgctgcagtcctccggcctgtactccctgtccagcgtcgtgaccgtgccctcctccagcctgggcaccaagacctacacctgtaacgtggaccacaagccctccaacaccaaagtggacaagcgggtggaatctaagtacggccctccctgccctccttgccctgcccctgagttcctgggcggaccttccgtgttcctgttccctccaaagcccaaggacaccctgatgatctcccggacccctgaagtgacctgcgtggtggtggacgtgtcccaggaagatcccgaagtccagttcaattggtacgtggacggcgtggaagtgcacaacgccaagaccaagcccagagaggaacagttcaactccacctaccgggtggtgtccgtgctgaccgtgctgcaccaggactggctgaacggcaaagagtacaagtgcaaagtgtccaacaagggcctgccctccagcatcgaaaagaccatctccaaggccaagggccagccccgcgagccccaagtgtacaccctgcctcccagccaggaagagatgaccaagaatcaagtgtccctgacttgtctggtcaagggcttctacccctccgatatcgccgtggagtgggagtccaacggccagcccgagaacaactacaagaccacccctcccgtgctggactccgacggctccttcttcctgtactctcggctgaccgtggacaagtcccggtggcaggaaggcaacgtcttctcctgctccgtgatgcacgaggccctgcacaaccactacacccagaagtccctgtccctgtctctgggcaag

SEQ ID NO: 447 - protein, 5 aa, Artificial Sequence
  source: /note="Description of Artificial Sequence: Synthetic peptide"
  VARIANT (1)..(1): /replace="Y" or "S"
  VARIANT (2)..(2): /replace="N"
  SITE (1)..(5): /note="Variant residues given in the sequence have no preference with respect to those in the annotations for variant positions"
RYAMS

SEQ ID NO: 448 - protein, 17 aa, Artificial Sequence
  source: /note="Description of Artificial Sequence: Synthetic peptide"
  VARIANT (1)..(1): /replace="S"
  VARIANT (3)..(3): /replace="T"
  VARIANT (5)..(5): /replace="T"
  VARIANT (7)..(7): /replace="G" or "S"
  VARIANT (8)..(8): /replace="S" or "L" or "Y"
  SITE (1)..(17): /note="Variant residues given in the sequence have no preference with respect to those in the annotations for variant positions"
AISGSGMNTYYADSVKG

SEQ ID NO: 449 - protein, 5 aa, Artificial Sequence
  source: /note="Description of Artificial Sequence: Synthetic peptide"
  VARIANT (1)..(1): /replace="G" or "S"
  VARIANT (2)..(2): /replace="R"
  SITE (1)..(5): /note="Variant residues given in the sequence have no preference with respect to those in the annotations for variant positions"
RYYWS

SEQ ID NO: 450 - protein, 16 aa, Artificial Sequence
  source: /note="Description of Artificial Sequence: Synthetic peptide"
  VARIANT (4)..(4): /replace="S"
  VARIANT (5)..(5): /replace="S" or "T"
  VARIANT (9)..(9): /replace="K"
  SITE (1)..(16): /note="Variant residues given in the sequence have no preference with respect to those in the annotations for variant positions"
YIYGRGSTNYNPSLKS

SEQ ID NO: 451 - protein, 327 aa, Artificial Sequence
  source: /note="Description of Artificial Sequence: Synthetic polypeptide"
ASTKGPSVFPLAPCSRSTSESTAALGCLVKDYFPEPVTVSWNSGALTSGVHTFPAVLQSSGLYSLSSVVTVPSSSLGTKTYTCNVDHKPSNTKVDKRVESKYGPPCPPCPAPEFLGGPSVFLFPPKPKDTLMISRTPEVTCVVVDVSQEDPEVQFNWYVDGVEVHNAKTKPREEQFNSTYRVVSVLTVLHQDWLNGKEYKCKVSNKGLPSSIEKTISKAKGQPREPQVYTLPPSQEEMTKNQVSLTCLVKGFYPSDIAVEWESNGQPENNYKTTPPVLDSDGSFFLYSRLTVDKSRWQEGNVFSCSVMHEALHNHYTQKSLSLSLGK

SEQ ID NO: 452 - protein, 326 aa, Artificial Sequence
  source: /note="Description of Artificial Sequence: Synthetic polypeptide"
ASTKGPSVFPLAPCSRSTSESTAALGCLVKDYFPEPVTVSWNSGALTSGVHTFPAVLQSSGLYSLSSVVTVPSSSLGTKTYTCNVDHKPSNTKVDKRVESKYGPPCPPCPAPEFLGGPSVFLFPPKPKDTLMISRTPEVTCVVVDVSQEDPEVQFNWYVDGVEVHNAKTKPREEQFNSTYRVVSVLTVLHQDWLNGKEYKCKVSNKGLPSSIEKTISKAKGQPREPQVYTLPPSQEEMTKNQVSLTCLVKGFYPSDIAVEWESNGQPENNYKTTPPVLDSDGSFFLYSRLTVDKSRWQEGNVFSCSVMHEALHNHYTQKSLSLSLG

SEQ ID NO: 453 - protein, 327 aa, Artificial Sequence
  source: /note="Description of Artificial Sequence: Synthetic polypeptide"
ASTKGPSVFPLAPCSRSTSESTAALGCLVKDYFPEPVTVSWNSGALTSGVHTFPAVLQSSGLYSLSSVVTVPSSSLGTKTYTCNVDHKPSNTKVDKRVESKYGPPCPPCPAPEFEGGPSVFLFPPKPKDTLMISRTPEVTCVVVDVSQEDPEVQFNWYVDGVEVHNAKTKPREEQFNSTYRVVSVLTVLHQDWLNGKEYKCKVSNKGLPSSIEKTISKAKGQPREPQVYTLPPSQEEMTKNQVSLTCLVKGFYPSDIAVEWESNGQPENNYKTTPPVLDSDGSFFLYSRLTVDKSRWQEGNVFSCSVMHEALHNHYTQKSLSLSLGK

SEQ ID NO: 454 - protein, 326 aa, Artificial Sequence
  source: /note="Description of Artificial Sequence: Synthetic polypeptide"
ASTKGPSVFPLAPCSRSTSESTAALGCLVKDYFPEPVTVSWNSGALTSGVHTFPAVLQSSGLYSLSSVVTVPSSSLGTKTYTCNVDHKPSNTKVDKRVESKYGPPCPPCPAPEFEGGPSVFLFPPKPKDTLMISRTPEVTCVVVDVSQEDPEVQFNWYVDGVEVHNAKTKPREEQFNSTYRVVSVLTVLHQDWLNGKEYKCKVSNKGLPSSIEKTISKAKGQPREPQVYTLPPSQEEMTKNQVSLTCLVKGFYPSDIAVEWESNGQPENNYKTTPPVLDSDGSFFLYSRLTVDKSRWQEGNVFSCSVMHEALHNHYTQKSLSLSLG

SEQ ID NO: 455 - protein, 330 aa, Homo sapiens
ASTKGPSVFPLAPSSKSTSGGTAALGCLVKDYFPEPVTVSWNSGALTSGVHTFPAVLQSSGLYSLSSVVTVPSSSLGTQTYICNVNHKPSNTKVDKRVEPKSCDKTHTCPPCPAPELLGGPSVFLFPPKPKDTLMISRTPEVTCVVVDVSHEDPEVKFNWYVDGVEVHNAKTKPREEQYNSTYRVVSVLTVLHQDWLNGKEYKCKVSNKALPAPIEKTISKAKGQPREPQVYTLPPSREEMTKNQVSLTCLVKGFYPSDIAVEWESNGQPENNYKTTPPVLDSDGSFFLYSKLTVDKSRWQQGNVFSCSVMHEALHNHYTQKSLSLSPGK

SEQ ID NO: 456 - protein, 329 aa, Artificial Sequence
  source: /note="Description of Artificial Sequence: Synthetic polypeptide"
ASTKGPSVFPLAPSSKSTSGGTAALGCLVKDYFPEPVTVSWNSGALTSGVHTFPAVLQSSGLYSLSSVVTVPSSSLGTQTYICNVNHKPSNTKVDKRVEPKSCDKTHTCPPCPAPELLGGPSVFLFPPKPKDTLMISRTPEVTCVVVDVSHEDPEVKFNWYVDGVEVHNAKTKPREEQYNSTYRVVSVLTVLHQDWLNGKEYKCKVSNKALPAPIEKTISKAKGQPREPQVYTLPPSREEMTKNQVSLTCLVKGFYPSDIAVEWESNGQPENNYKTTPPVLDSDGSFFLYSKLTVDKSRWQQGNVFSCSVMHEALHNHYTQKSLSLSPG

SEQ ID NO: 457 - protein, 330 aa, Artificial Sequence
  source: /note="Description of Artificial Sequence: Synthetic polypeptide"
ASTKGPSVFPLAPSSKSTSGGTAALGCLVKDYFPEPVTVSWNSGALTSGVHTFPAVLQSSGLYSLSSVVTVPSSSLGTQTYICNVNHKPSNTKVDKRVEPKSCDKTHTCPPCPAPELLGGPSVFLFPPKPKDTLMISRTPEVTCVVVDVSHEDPEVKFNWYVDGVEVHNAKTKPREEQYASTYRVVSVLTVLHQDWLNGKEYKCKVSNKALPAPIEKTISKAKGQPREPQVYTLPPSREEMTKNQVSLTCLVKGFYPSDIAVEWESNGQPENNYKTTPPVLDSDGSFFLYSKLTVDKSRWQQGNVFSCSVMHEALHNHYTQKSLSLSPGK

SEQ ID NO: 458 - protein, 329 aa, Artificial Sequence
  source: /note="Description of Artificial Sequence: Synthetic polypeptide"
ASTKGPSVFPLAPSSKSTSGGTAALGCLVKDYFPEPVTVSWNSGALTSGVHTFPAVLQSSGLYSLSSVVTVPSSSLGTQTYICNVNHKPSNTKVDKRVEPKSCDKTHTCPPCPAPELLGGPSVFLFPPKPKDTLMISRTPEVTCVVVDVSHEDPEVKFNWYVDGVEVHNAKTKPREEQYASTYRVVSVLTVLHQDWLNGKEYKCKVSNKALPAPIEKTISKAKGQPREPQVYTLPPSREEMTKNQVSLTCLVKGFYPSDIAVEWESNGQPENNYKTTPPVLDSDGSFFLYSKLTVDKSRWQQGNVFSCSVMHEALHNHYTQKSLSLSPG

SEQ ID NO: 459 - protein, 330 aa, Artificial Sequence
  source: /note="Description of Artificial Sequence: Synthetic polypeptide"
ASTKGPSVFPLAPSSKSTSGGTAALGCLVKDYFPEPVTVSWNSGALTSGVHTFPAVLQSSGLYSLSSVVTVPSSSLGTQTYICNVNHKPSNTKVDKRVEPKSCDKTHTCPPCPAPELLGGPSVFLFPPKPKDTLMISRTPEVTCVVVAVSHEDPEVKFNWYVDGVEVHNAKTKPREEQYNSTYRVVSVLTVLHQDWLNGKEYKCKVSNKALAAPIEKTISKAKGQPREPQVYTLPPSREEMTKNQVSLTCLVKGFYPSDIAVEWESNGQPENNYKTTPPVLDSDGSFFLYSKLTVDKSRWQQGNVFSCSVMHEALHNHYTQKSLSLSPGK

SEQ ID NO: 460 - protein, 329 aa, Artificial Sequence
  source: /note="Description of Artificial Sequence: Synthetic polypeptide"
ASTKGPSVFPLAPSSKSTSGGTAALGCLVKDYFPEPVTVSWNSGALTSGVHTFPAVLQSSGLYSLSSVVTVPSSSLGTQTYICNVNHKPSNTKVDKRVEPKSCDKTHTCPPCPAPELLGGPSVFLFPPKPKDTLMISRTPEVTCVVVAVSHEDPEVKFNWYVDGVEVHNAKTKPREEQYNSTYRVVSVLTVLHQDWLNGKEYKCKVSNKALAAPIEKTISKAKGQPREPQVYTLPPSREEMTKNQVSLTCLVKGFYPSDIAVEWESNGQPENNYKTTPPVLDSDGSFFLYSKLTVDKSRWQQGNVFSCSVMHEALHNHYTQKSLSLSPG

SEQ ID NO: 461 - protein, 330 aa, Artificial Sequence
  source: /note="Description of Artificial Sequence: Synthetic polypeptide"
ASTKGPSVFPLAPSSKSTSGGTAALGCLVKDYFPEPVTVSWNSGALTSGVHTFPAVLQSSGLYSLSSVVTVPSSSLGTQTYICNVNHKPSNTKVDKRVEPKSCDKTHTCPPCPAPEAAGGPSVFLFPPKPKDTLMISRTPEVTCVVVDVSHEDPEVKFNWYVDGVEVHNAKTKPREEQYNSTYRVVSVLTVLHQDWLNGKEYKCKVSNKALPAPIEKTISKAKGQPREPQVYTLPPSREEMTKNQVSLTCLVKGFYPSDIAVEWESNGQPENNYKTTPPVLDSDGSFFLYSKLTVDKSRWQQGNVFSCSVMHEALHNHYTQKSLSLSPGK

SEQ ID NO: 462 - protein, 329 aa, Artificial Sequence
  source: /note="Description of Artificial Sequence: Synthetic polypeptide"
ASTKGPSVFPLAPSSKSTSGGTAALGCLVKDYFPEPVTVSWNSGALTSGVHTFPAVLQSSGLYSLSSVVTVPSSSLGTQTYICNVNHKPSNTKVDKRVEPKSCDKTHTCPPCPAPEAAGGPSVFLFPPKPKDTLMISRTPEVTCVVVDVSHEDPEVKFNWYVDGVEVHNAKTKPREEQYNSTYRVVSVLTVLHQDWLNGKEYKCKVSNKALPAPIEKTISKAKGQPREPQVYTLPPSREEMTKNQVSLTCLVKGFYPSDIAVEWESNGQPENNYKTTPPVLDSDGSFFLYSKLTVDKSRWQQGNVFSCSVMHEALHNHYTQKSLSLSPG

SEQ ID NO: 463 - protein, 107 aa, Homo sapiens [sequence omitted]

SEQ ID NO: 464 - protein, 574 aa, Homo sapiens [sequence omitted]

SEQ ID NO: 465 - protein, 574 aa, Homo sapiens
MCPRAARAPATLLLALGAVLWPAAGAWELTILHTNDVHSRLEQTSEDSSKCVNASRCMGGVARLFTKVQQIRRAEPNVLLLDAGDQYQGTIWFTVYKGAEVAHFMNALRYDAMALGNHEFDNGVEGLIEPLLKEAKFPILSANIKAKGPLASQISGLYLPYKVLPVGDEVVGIVGYTSKETPFLSNPGTNLVFEDEITALQPEVDKLKTLNVNKIIALGHSGFEMDKLIAQKVRGVDVVVGGHSNTFLYTGNPPSKEVPAGKYPFIVTSDDGRKVPVVQAYAFGKYLGYLKIEFDERGNVISSHGNPILLNSSIPEDPSIKADINKWRIKLDNYSTQELGKTIVYLDGSSQSCRFRECNMGNLICDAMINNNLRHTDEMFWNHVSMCILNGGGIRSPIDERNNGTITWENLAAVLPFGGTFDLVQLKGSTLKKAFEHSVHRYGQSTGEFLQVGGIHVVYDLSRKPGDRVVKLDVLCTKCRVPSYDPLKMDEVYKVILPNFLANGGDGFQMIKDELLRHDSGDQDINVVSTYISKMKVIYPAVEGRIKFSTGSHCHGSFSLIFLSLWAVIFVLYQ

SEQ ID NO: 466 - protein, 524 aa, Homo sapiens
MCPRAARAPATLLLALGAVLWPAAGAWELTILHTNDVHSRLEQTSEDSSKCVNASRCMGGVARLFTKVQQIRRAEPNVLLLDAGDQYQGTIWFTVYKGAEVAHFMNALRYDAMALGNHEFDNGVEGLIEPLLKEAKFPILSANIKAKGPLASQISGLYLPYKVLPVGDEVVGIVGYTSKETPFLSNPGTNLVFEDEITALQPEVDKLKTLNVNKIIALGHSGFEMDKLIAQKVRGVDVVVGGHSNTFLYTGNPPSKEVPAGKYPFIVTSDDGRKVPVVQAYAFGKYLGYLKIEFDERGNVISSHGNPILLNSSIPEDPSIKADINKWRIKLDNYSTQELGKTIVYLDGSSQSCRFRECNMGNLICDAMINNNLRHTDEMFWNHVSMCILNGGGIRSPIDERNNGIHVVYDLSRKPGDRVVKLDVLCTKCRVPSYDPLKMDEVYKVILPNFLANGGDGFQMIKDELLRHDSGDQDINVVSTYISKMKVIYPAVEGRIKFSTGSHCHGSFSLIFLSLWAVIFVLYQ

SEQ ID NO: 467 - protein, 15 aa, Homo sapiens
YLPYKVLPVGDEVVG

SEQ ID NO: 468 - protein, 10 aa, Homo sapiens
KLKTLNVNKI

SEQ ID NO: 469 - protein, 20 aa, Homo sapiens
MINNNLRHADETFWNHVSMC

SEQ ID NO: 470 - protein, 18 aa, Homo sapiens
YQGTIWFTVYKGAEVAHF

SEQ ID NO: 471 - protein, 448 aa, Artificial Sequence
  source: /note="Description of Artificial Sequence: Synthetic polypeptide"
  VARIANT (448)..(448): /replace=" "
  SITE (1)..(448): /note="Variant residues given in the sequence have no preference with respect to those in the annotations for variant positions"
QVQLQESGPGLVKPSETLSLTCTVSGGSISGRYWSWIRQPPGKGLEWIGYIYGTGSTNYNPSLKSRVTISVDTSKNQFSLKLSSVTAADTAVYYCARESQESPYNNWFDPWGQGTLVTVSSASTKGPSVFPLAPCSRSTSESTAALGCLVKDYFPEPVTVSWNSGALTSGVHTFPAVLQSSGLYSLSSVVTVPSSSLGTKTYTCNVDHKPSNTKVDKRVESKYGPPCPPCPAPEFEGGPSVFLFPPKPKDTLMISRTPEVTCVVVDVSQEDPEVQFNWYVDGVEVHNAKTKPREEQFNSTYRVVSVLTVLHQDWLNGKEYKCKVSNKGLPSSIEKTISKAKGQPREPQVYTLPPSQEEMTKNQVSLTCLVKGFYPSDIAVEWESNGQPENNYKTTPPVLDSDGSFFLYSRLTVDKSRWQEGNVFSCSVMHEALHNHYTQKSLSLSLGK

SEQ ID NO: 472 - protein, 448 aa, Artificial Sequence
  source: /note="Description of Artificial Sequence: Synthetic polypeptide"
  VARIANT (448)..(448): /replace=" "
  SITE (1)..(448): /note="Variant residues given in the sequence have no preference with respect to those in the annotations for variant positions"
QVQLQESGPGLVKPSETLSLTCTVSGGSIEGRYWSWIRQPPGKGLEWIGYIYGSGSTKYNPSLKSRVTISVDTSKNQFSLKLSSVTAADTAVYYCARESQESPYNNWFDPWGQGTLVTVSSASTKGPSVFPLAPCSRSTSESTAALGCLVKDYFPEPVTVSWNSGALTSGVHTFPAVLQSSGLYSLSSVVTVPSSSLGTKTYTCNVDHKPSNTKVDKRVESKYGPPCPPCPAPEFEGGPSVFLFPPKPKDTLMISRTPEVTCVVVDVSQEDPEVQFNWYVDGVEVHNAKTKPREEQFNSTYRVVSVLTVLHQDWLNGKEYKCKVSNKGLPSSIEKTISKAKGQPREPQVYTLPPSQEEMTKNQVSLTCLVKGFYPSDIAVEWESNGQPENNYKTTPPVLDSDGSFFLYSRLTVDKSRWQEGNVFSCSVMHEALHNHYTQKSLSLSLGK

SEQ ID NO: 473 - protein, 451 aa, Artificial Sequence
  source: /note="Description of Artificial Sequence: Synthetic polypeptide"
  VARIANT (451)..(451): /replace=" "
  SITE (1)..(451): /note="Variant residues given in the sequence have no preference with respect to those in the annotations for variant positions"
EVQLLESGGGLVQPGGSLRLSCAASGFTFHRYAMSWVRQAPGKGLEWVSAISGSGMNTYYADSVKGRFTISRDNSKNTLYLQMNSLRAEDTAVYYCARGGLYGSGSYLSDFDLWGRGTLVTVSSASTKGPSVFPLAPCSRSTSESTAALGCLVKDYFPEPVTVSWNSGALTSGVHTFPAVLQSSGLYSLSSVVTVPSSSLGTKTYTCNVDHKPSNTKVDKRVESKYGPPCPPCPAPEFEGGPSVFLFPPKPKDTLMISRTPEVTCVVVDVSQEDPEVQFNWYVDGVEVHNAKTKPREEQFNSTYRVVSVLTVLHQDWLNGKEYKCKVSNKGLPSSIEKTISKAKGQPREPQVYTLPPSQEEMTKNQVSLTCLVKGFYPSDIAVEWESNGQPENNYKTTPPVLDSDGSFFLYSRLTVDKSRWQEGNVFSCSVMHEALHNHYTQKSLSLSLGK

SEQ ID NO: 474 - protein, 448 aa, Artificial Sequence
  source: /note="Description of Artificial Sequence: Synthetic polypeptide"
  VARIANT (448)..(448): /replace=" "
  SITE (1)..(448): /note="Variant residues given in the sequence have no preference with respect to those in the annotations for variant positions"
QVQLQESGPGLVKPSETLSLTCTVSGGSIERYYWSWIRQPPGKGLEWIGYIYGRGSTNYNPSLKSRVTISVDTSKNQFSLKLSSVTAADTAVYYCARESQESPYNNWFDPWGQGTLVTVSSASTKGPSVFPLAPCSRSTSESTAALGCLVKDYFPEPVTVSWNSGALTSGVHTFPAVLQSSGLYSLSSVVTVPSSSLGTKTYTCNVDHKPSNTKVDKRVESKYGPPCPPCPAPEFEGGPSVFLFPPKPKDTLMISRTPEVTCVVVDVSQEDPEVQFNWYVDGVEVHNAKTKPREEQFNSTYRVVSVLTVLHQDWLNGKEYKCKVSNKGLPSSIEKTISKAKGQPREPQVYTLPPSQEEMTKNQVSLTCLVKGFYPSDIAVEWESNGQPENNYKTTPPVLDSDGSFFLYSRLTVDKSRWQEGNVFSCSVMHEALHNHYTQKSLSLSLGK

SEQ ID NO: 475 - protein, 451 aa, Artificial Sequence
  source: /note="Description of Artificial Sequence: Synthetic polypeptide"
  VARIANT (451)..(451): /replace=" "
  SITE (1)..(451): /note="Variant residues given in the sequence have no preference with respect to those in the annotations for variant positions"
EVQLLESGGGLVQPGGSLRLSCAASGFTFSYNAMSWVRQAPGKGLEWVSSISGTGGSTYYADSVKGRFTISRDNSKNTLYLQMNSLRAEDTAVYYCARGGLYGSGSYLSDFDLWGRGTLVTVSSASTKGPSVFPLAPCSRSTSESTAALGCLVKDYFPEPVTVSWNSGALTSGVHTFPAVLQSSGLYSLSSVVTVPSSSLGTKTYTCNVDHKPSNTKVDKRVESKYGPPCPPCPAPEFEGGPSVFLFPPKPKDTLMISRTPEVTCVVVDVSQEDPEVQFNWYVDGVEVHNAKTKPREEQFNSTYRVVSVLTVLHQDWLNGKEYKCKVSNKGLPSSIEKTISKAKGQPREPQVYTLPPSQEEMTKNQVSLTCLVKGFYPSDIAVEWESNGQPENNYKTTPPVLDSDGSFFLYSRLTVDKSRWQEGNVFSCSVMHEALHNHYTQKSLSLSLGK

SEQ ID NO: 476 - protein, 451 aa, Artificial Sequence
  source: /note="Description of Artificial Sequence: Synthetic polypeptide"
  VARIANT (451)..(451): /replace=" "
  SITE (1)..(451): /note="Variant residues given in the sequence have no preference with respect to those in the annotations for variant positions"
EVQLLESGGGLVQPGGSLRLSCAASGFTFSRYAMSWVRQAPGKGLEWVSSISGTGGSTYYADSVKGRFTISRDNSKNTLYLQMNSLRAEDTAVYYCARGGLYGSGSYLSDFDLWGRGTLVTVSSASTKGPSVFPLAPCSRSTSESTAALGCLVKDYFPEPVTVSWNSGALTSGVHTFPAVLQSSGLYSLSSVVTVPSSSLGTKTYTCNVDHKPSNTKVDKRVESKYGPPCPPCPAPEFEGGPSVFLFPPKPKDTLMISRTPEVTCVVVDVSQEDPEVQFNWYVDGVEVHNAKTKPREEQFNSTYRVVSVLTVLHQDWLNGKEYKCKVSNKGLPSSIEKTISKAKGQPREPQVYTLPPSQEEMTKNQVSLTCLVKGFYPSDIAVEWESNGQPENNYKTTPPVLDSDGSFFLYSRLTVDKSRWQEGNVFSCSVMHEALHNHYTQKSLSLSLGK

SEQ ID NO: 477 - protein, 13 aa, Homo sapiens
RGNVISSHGNPIL

SEQ ID NO: 478 - protein, 330 aa, Homo sapiens [sequence omitted]

SEQ ID NO: 479 - protein, 329 aa, Artificial Sequence
  source: /note="Description of Artificial Sequence: Synthetic polypeptide"
ASTKGPSVFPLAPSSKSTSGGTAALGCLVKDYFPEPVTVSWNSGALTSGVHTFPAVLQSSGLYSLSSVVTVPSSSLGTQTYICNVNHKPSNTKVDKKVEPKSCDKTHTCPPCPAPELLGGPSVFLFPPKPKDTLMISRTPEVTCVVVDVSHEDPEVKFNWYVDGVEVHNAKTKPREEQYNSTYRVVSVLTVLHQDWLNGKEYKCKVSNKALPAPIEKTISKAKGQPREPQVYTLPPSRDELTKNQVSLTCLVKGFYPSDIAVEWESNGQPENNYKTTPPVLDSDGSFFLYSKLTVDKSRWQQGNVFSCSVMHEALHNHYTQKSLSLSPG

SEQ ID NO: 480 - protein, 20 aa, Homo sapiens
MINNNLRHTDEMFWNHVSMC

SEQ ID NO: 481 - protein, 7 aa, Artificial Sequence
  source: /note="Description of Artificial Sequence: Synthetic peptide"
  VARIANT (5)..(5): /replace="S" or "R" or "K"
  VARIANT (6)..(6): /replace="Y" or "S"
  VARIANT (7)..(7): /replace="N"
  SITE (1)..(7): /note="Variant residues given in the sequence have no preference with respect to those in the annotations for variant positions"
GFTFHRY

SEQ ID NO: 482 - protein, 6 aa, Artificial Sequence
  source: /note="Description of Artificial Sequence: Synthetic peptide"
  VARIANT (1)..(1): /replace="T"
  VARIANT (3)..(3): /replace="T"
  VARIANT (5)..(5): /replace="G" or "S"
  VARIANT (6)..(6): /replace="S" or "L" or "Y"
  SITE (1)..(6): /note="Variant residues given in the sequence have no preference with respect to those in the annotations for variant positions"
SGSGMN

SEQ ID NO: 483 - protein, 7 aa, Artificial Sequence
  source: /note="Description of Artificial Sequence: Synthetic peptide"
  VARIANT (5)..(5): /replace="S"
  VARIANT (6)..(6): /replace="G" or "S"
  VARIANT (7)..(7): /replace="R"
  SITE (1)..(7): /note="Variant residues given in the sequence have no preference with respect to those in the annotations for variant positions"
GGSIERY

SEQ ID NO: 484 - protein, 5 aa, Artificial Sequence
  source: /note="Description of Artificial Sequence: Synthetic peptide"
  VARIANT (2)..(2): /replace="S"
  VARIANT (3)..(3): /replace="S" or "T"
  SITE (1)..(5): /note="Variant residues given in the sequence have no preference with respect to those in the annotations for variant positions"
YGRGS

SEQ ID NO: 485 - protein, 10 aa, Artificial Sequence
  source: /note="Description of Artificial Sequence: Synthetic peptide"
  VARIANT (5)..(5): /replace="S" or "R" or "K"
  VARIANT (6)..(6): /replace="Y" or "S"
  VARIANT (7)..(7): /replace="N"
  SITE (1)..(10): /note="Variant residues given in the sequence have no preference with respect to those in the annotations for variant positions"
GFTFHRYAMS

SEQ ID NO: 486 - protein, 10 aa, Artificial Sequence
  source: /note="Description of Artificial Sequence: Synthetic peptide"
  VARIANT (5)..(5): /replace="S"
  VARIANT (6)..(6): /replace="G" or "S"
  VARIANT (7)..(7): /replace="R"
  SITE (1)..(10): /note="Variant residues given in the sequence have no preference with respect to those in the annotations for variant positions"
GGSIERYYWS

SEQ ID NO: 487 - protein, 8 aa, Artificial Sequence
  source: /note="Description of Artificial Sequence: Synthetic peptide"
  VARIANT (5)..(5): /replace="S" or "R" or "K"
  VARIANT (6)..(6): /replace="Y" or "S"
  VARIANT (7)..(7): /replace="N"
  SITE (1)..(8): /note="Variant residues given in the sequence have no preference with respect to those in the annotations for variant positions"
GFTFHRYA

SEQ ID NO: 488 - protein, 8 aa, Artificial Sequence
  source: /note="Description of Artificial Sequence: Synthetic peptide"
  VARIANT (2)..(2): /replace="T"
  VARIANT (4)..(4): /replace="T"
  VARIANT (6)..(6): /replace="G" or "S"
  VARIANT (7)..(7): /replace="S" or "L" or "Y"
  SITE (1)..(8): /note="Variant residues given in the sequence have no preference with respect to those in the annotations for variant positions"
ISGSGMNT

SEQ ID NO: 489 - protein, 8 aa, Artificial Sequence
  source: /note="Description of Artificial Sequence: Synthetic peptide"
  VARIANT (5)..(5): /replace="S"
  VARIANT (6)..(6): /replace="G" or "S"
  VARIANT (7)..(7): /replace="R"
  SITE (1)..(8): /note="Variant residues given in the sequence have no preference with respect to those in the annotations for variant positions"
GGSIERYY

SEQ ID NO: 490 - protein, 7 aa, Artificial Sequence
  source: /note="Description of Artificial Sequence: Synthetic peptide"
  VARIANT (3)..(3): /replace="S"
  VARIANT (4)..(4): /replace="S" or "T"
  SITE (1)..(7): /note="Variant residues given in the sequence have no preference with respect to those in the annotations for variant positions"
IYGRGST

SEQ ID NO: 491 - protein, 521 aa, Homo sapiens
WELTILHTNDVHSRLEQTSEDSSKCVNASRCMGGVARLFTKVQQIRRAEPNVLLLDAGDQYQGTIWFTVYKGAEVAHFMNALRYDAMALGNHEFDNGVEGLIEPLLKEAKFPILSANIKAKGPLASQISGLYLPYKVLPVGDEVVGIVGYTSKETPFLSNPGTNLVFEDEITALQPEVDKLKTLNVNKIIALGHSGFEMDKLIAQKVRGVDVVVGGHSNTFLYTGNPPSKEVPAGKYPFIVTSDDGRKVPVVQAYAFGKYLGYLKIEFDERGNVISSHGNPILLNSSIPEDPSIKADINKWRIKLDNYSTQELGKTIVYLDGSSQSCRFRECNMGNLICDAMINNNLRHADETFWNHVSMCILNGGGIRSPIDERNNGTITWENLAAVLPFGGTFDLVQLKGSTLKKAFEHSVHRYGQSTGEFLQVGGIHVVYDLSRKPGDRVVKLDVLCTKCRVPSYDPLKMDEVYKVILPNFLANGGDGFQMIKDELLRHDSGDQDINVVSTYISKMKVIYPAVEGRIK

SEQ ID NO: 492 - protein, 10 aa, Artificial Sequence
  source: /note="Description of Artificial Sequence: Synthetic peptide"
GFTFRSYAMS

SEQ ID NO: 493 - protein, 17 aa, Artificial Sequence
  source: /note="Description of Artificial Sequence: Synthetic peptide"
AITGSGGLTYYADSVKG

SEQ ID NO: 494 - protein, 5 aa, Artificial Sequence
  source: /note="Description of Artificial Sequence: Synthetic peptide"
SYAMS

SEQ ID NO: 495 - protein, 7 aa, Artificial Sequence
  source: /note="Description of Artificial Sequence: Synthetic peptide"
GFTFRSY

SEQ ID NO: 496 - protein, 6 aa, Artificial Sequence
  source: /note="Description of Artificial Sequence: Synthetic peptide"
TGSGGL

SEQ ID NO: 497 - protein, 8 aa, Artificial Sequence
  source: /note="Description of Artificial Sequence: Synthetic peptide"
GFTFRSYA

SEQ ID NO: 498 - protein, 8 aa, Artificial Sequence
  source: /note="Description of Artificial Sequence: Synthetic peptide"
ITGSGGLT

SEQ ID NO: 499 - protein, 124 aa, Artificial Sequence
  source: /note="Description of Artificial Sequence: Synthetic polypeptide"
EVQLLESGGGLVQPGGSLRLSCAASGFTFRSYAMSWVRQAPGKGLEWVSAITGSGGLTYYADSVKGRFTISRDNSKNTLYLQMNSLRAEDTAVYYCARGGLYGSGSYLSDFDLWGRGTLVTVSS

SEQ ID NO: 500 - DNA, 372 bp, Artificial Sequence
  source: /note="Description of Artificial Sequence: Synthetic polynucleotide"
gaggtgcagctgttggagtctgggggaggcttggtacagcctggggggtccctgagactctcctgtgcagcctctggattcacctttcgtagctatgccatgagctgggtccgccaggctccagggaaggggctggagtgggtctcagctattacgggaagtggtggtttgacatactacgcagactccgtgaagggccggttcaccatctccagagacaattccaagaacacgctgtatctgcaaatgaacagcctgagagccgaggacacggcggtgtactactgcgccagaggtggattgtacggaagcggaagctacttgagtgacttcgacctatgggggagaggtaccttggtcaccgtctcctca

SEQ ID NO: 501 - DNA, 321 bp, Artificial Sequence
  source: /note="Description of Artificial Sequence: Synthetic polynucleotide"
gaaatagtgttgacgcagtctccagccaccctgtctgtgtctccaggggaaagagccaccctctcctgcagggccagtcagagtgttggcagcaacttagcctggtaccagcagaaacctggccaggctcccaggctcctcatctatggtgcatccaccagggccactggtatcccagccaggttcagtggcagtgggtctgggacagagttcactctcaccatcagcagcctgcagtctgaagattttgcagtttattactgtcagcagcacaatgccttcccttacacttttggcggagggaccaaggttgagatcaaa

SEQ ID NO: 502 - protein, 10 aa, Artificial Sequence
  source: /note="Description of Artificial Sequence: Synthetic peptide"
GFTFKSYAMS

SEQ ID NO: 503 - protein, 17 aa, Artificial Sequence
  source: /note="Description of Artificial Sequence: Synthetic peptide"
AISGSGSYTYYADSVKG

SEQ ID NO: 504 - protein, 7 aa, Artificial Sequence
  source: /note="Description of Artificial Sequence: Synthetic peptide"
GFTFKSY

SEQ ID NO: 505 - protein, 6 aa, Artificial Sequence
  source: /note="Description of Artificial Sequence: Synthetic peptide"
SGSGSY

SEQ ID NO: 506 - protein, 8 aa, Artificial Sequence
  source: /note="Description of Artificial Sequence: Synthetic peptide"
GFTFKSYA

SEQ ID NO: 507 - protein, 8 aa, Artificial Sequence
  source: /note="Description of Artificial Sequence: Synthetic peptide"
ISGSGSYT

SEQ ID NO: 508 - protein, 124 aa, Artificial Sequence
  source: /note="Description of Artificial Sequence: Synthetic polypeptide"
EVQLLESGGGLVQPGGSLRLSCAASGFTFKSYAMSWVRQAPGKGLEWVSAISGSGSYTYYADSVKGRFTISRDNSKNTLYLQMNSLRAEDTAVYYCARGGLYGSGSYLSDFDLWGRGTLVTVSS

SEQ ID NO: 509 - DNA, 372 bp, Artificial Sequence
  source: /note="Description of Artificial Sequence: Synthetic polynucleotide"
gaggtgcagctgttggagtctgggggaggcttggtacagcctggggggtccctgagactctcctgtgcagcctctggattcacctttaagagctatgccatgagttgggtccgccaggctccagggaaggggctggagtgggtctcagctattagtggaagtggttcgtatacatactacgcagactccgtgaagggccggttcaccatctccagagacaattccaagaacacgctgtatctgcaaatgaacagcctgagagccgaggacacggcggtgtactactgcgccagaggtggattgtacggaagcggaagctacttgagtgacttcgacctatgggggagaggtaccttggtcaccgtctcctca

SEQ ID NO: 510 - protein, 10 aa, Artificial Sequence
  source: /note="Description of Artificial Sequence: Synthetic peptide"
GFTFSSYAMS

SEQ ID NO: 511 - protein, 17 aa, Artificial Sequence
  source: /note="Description of Artificial Sequence: Synthetic peptide"
AISGSGGSTYYADSVKG

SEQ ID NO: 512 - protein, 7 aa, Artificial Sequence
  source: /note="Description of Artificial Sequence: Synthetic peptide"
GFTFSSY

SEQ ID NO: 513 - protein, 6 aa, Artificial Sequence
  source: /note="Description of Artificial Sequence: Synthetic peptide"
SGSGGS

SEQ ID NO: 514 - protein, 8 aa, Artificial Sequence
  source: /note="Description of Artificial Sequence: Synthetic peptide"
GFTFSSYA

SEQ ID NO: 515 - protein, 8 aa, Artificial Sequence
  source: /note="Description of Artificial Sequence: Synthetic peptide"
ISGSGGST

SEQ ID NO: 516 - protein, 124 aa, Artificial Sequence
  source: /note="Description of Artificial Sequence: Synthetic polypeptide"
EVQLLESGGGLVQPGGSLRLSCAASGFTFSSYAMSWVRQAPGKGLEWVSAISGSGGSTYYADSVKGRFTISRDNSKNTLYLQMNSLRAEDTAVYYCARGGLYGSGSYLSDFDLWGRGTLVTVSS

SEQ ID NO: 517 - DNA, 372 bp, Artificial Sequence
  source: /note="Description of Artificial Sequence: Synthetic polynucleotide"
gaggtgcagctgttggagtctgggggaggcttggtacagcctggggggtccctgagactctcctgtgcagcctctggattcacctttagcagctatgccatgagctgggtccgccaggctccagggaaggggctggagtgggtctcagctattagtggtagtggtggtagcacatactacgcagactccgtgaagggccggttcaccatctccagagacaattccaagaacacgctgtatctgcaaatgaacagcctgagagccgaggacacggcggtgtactactgcgccagaggtggattgtacggaagcggaagctacttgagtgacttcgacctatgggggagaggtaccttggtcaccgtctcctca

SEQ ID NO: 518 - protein, 10 aa, Artificial Sequence
  source: /note="Description of Artificial Sequence: Synthetic peptide"
GGSISSYYWS

SEQ ID NO: 519 - protein, 16 aa, Artificial Sequence
  source: /note="Description of Artificial Sequence: Synthetic peptide"
YIYSSGSTNYNPSLKS

SEQ ID NO: 520 - protein, 5 aa, Artificial Sequence
  source: /note="Description of Artificial Sequence: Synthetic peptide"
SYYWS

SEQ ID NO: 521 - protein, 7 aa, Artificial Sequence
  source: /note="Description of Artificial Sequence: Synthetic peptide"
GGSISSY

SEQ ID NO: 522 - protein, 5 aa, Artificial Sequence
  source: /note="Description of Artificial Sequence: Synthetic peptide"
YSSGS

SEQ ID NO: 523 - protein, 8 aa, Artificial Sequence
  source: /note="Description of Artificial Sequence: Synthetic peptide"
GGSISSYY

SEQ ID NO: 524 - protein, 7 aa, Artificial Sequence
  source: /note="Description of Artificial Sequence: Synthetic peptide"
IYSSGST

SEQ ID NO: 525 - protein, 121 aa, Artificial Sequence
  source: /note="Description of Artificial Sequence: Synthetic polypeptide"
QVQLQESGPGLVKPSETLSLTCTVSGGSISSYYWSWIRQPPGKGLEWIGYIYSSGSTNYNPSLKSRVTISVDTSKNQFSLKLSSVTAADTAVYYCARESQESPYNNWFDPWGQGTLVTVSS

SEQ ID NO: 526 - DNA, 363 bp, Artificial Sequence
  source: /note="Description of Artificial Sequence: Synthetic polynucleotide"
caggtgcagctgcaggagtcgggcccaggactggtgaagccttcggagaccctgtccctcacctgcactgtctctggtggctccatcagtagttactactggagctggatccggcagcccccagggaagggactggagtggattgggtatatctatagtagtgggagcaccaactacaacccctccctcaagagtcgagtcaccatatcagtagacacgtccaagaaccagttctccctgaagctgagttctgtgaccgccgcagacacggcggtgtactactgcgccagagaatctcaggagagtccatacaacaattggttcgacccatggggacagggtacattggtcaccgtctcctca

SEQ ID NO: 527 - DNA, 321 bp, Artificial Sequence
  source: /note="Description of Artificial Sequence: Synthetic polynucleotide"
gacatccagatgacccagtctccatcttccgtgtctgcatctgtaggagacagagtcaccatcacttgtcgggcgagtcagggtattagcagctggttagcctggtatcagcagaaaccagggaaagcccctaagctcctgatctatgctgcatccagtttgcaaagtggggtcccatcaaggttcagcggcagtggatctgggacagatttcactctcaccatcagcagcctgcagcctgaagattttgcaacttattactgtcagcagggaaacagtttccctaggacttttggcggagggaccaaggttgagatcaaa

SEQ ID NO: 528 - protein, 527 aa, Artificial Sequence
  source: /note="Description of Artificial Sequence: Synthetic polypeptide"
WELTILHTNDVHSRLEQTSEDSSKCVNASRCMGGVARLFTKVQQIRRAEPNVLLLDAGDQYQGTIWFTVYKGAEVAHFMNALRYDAMALGNHEFDNGVEGLIEPLLKEAKFPILSANIKAKGPLASQISGLYLPYKVLPVGDEVVGIVGYTSKETPFLSNPGTNLVFEDEITALQPEVDKLKTLNVNKIIALGHSGFEMDKLIAQKVRGVDVVVGGHSNTFLYTGNPPSKEVPAGKYPFIVTSDDGRKVPVVQAYAFGKYLGYLKIEFDERGNVISSHGNPILLNSSIPEDPSIKADINKWRIKLDNYSTQELGKTIVYLDGSSQSCRFRECNMGNLICDAMINNNLRHADETFWNHVSMCILNGGGIRSPIDERNNGTITWENLAAVLPFGGTFDLVQLKGSTLKKAFEHSVHRYGQSTGEFLQVGGIHVVYDLSRKPGDRVVKLDVLCTKCRVPSYDPLKMDEVYKVILPNFLANGGDGFQMIKDELLRHDSGDQDINVVSTYISKMKVIYPAVEGRIKHHHHHH

SEQ ID NO: 529 - protein, 9 aa, Artificial Sequence
  source: /note="Description of Artificial Sequence: Synthetic peptide"
  VARIANT (4)..(4): /replace="S" or "R" or "K"
  VARIANT (5)..(5): /replace="Y" or "S"
  VARIANT (6)..(6): /replace="N"
  SITE (1)..(9): /note="Variant residues given in the sequence have no preference with respect to those in the annotations for variant positions"
FTFHRYAMS

SEQ ID NO: 530 - protein, 9 aa, Artificial Sequence
  source: /note="Description of Artificial Sequence: Synthetic peptide"
FTFHRYAMS

SEQ ID NO: 531 - protein, 9 aa, Artificial Sequence
  source: /note="Description of Artificial Sequence: Synthetic peptide"
FTFSYNAMS

SEQ ID NO: 532 - protein, 9 aa, Artificial Sequence
  source: /note="Description of Artificial Sequence: Synthetic peptide"
FTFSRYAMS

SEQ ID NO: 533 - protein, 9 aa, Artificial Sequence
  source: /note="Description of Artificial Sequence: Synthetic peptide"
FTFRSYAMS

SEQ ID NO: 534 - protein, 9 aa, Artificial Sequence
  source: /note="Description of Artificial Sequence: Synthetic peptide"
FTFKSYAMS

SEQ ID NO: 535 - protein, 9 aa, Artificial Sequence
  source: /note="Description of Artificial Sequence: Synthetic peptide"
FTFSSYAMS

SEQ ID NO: 536 - protein, 9 aa, Artificial Sequence
  source: /note="Description of Artificial Sequence: Synthetic peptide"
  VARIANT (4)..(4): /replace="S"
  VARIANT (5)..(5): /replace="G" or "S"
  VARIANT (6)..(6): /replace="R"
  SITE (1)..(9): /note="Variant residues given in the sequence have no preference with respect to those in the annotations for variant positions"
GSIERYYWS

SEQ ID NO: 537 - protein, 9 aa, Artificial Sequence
  source: /note="Description of Artificial Sequence: Synthetic peptide"
GSIERYYWS

SEQ ID NO: 538 - protein, 9 aa, Artificial Sequence
  source: /note="Description of Artificial Sequence: Synthetic peptide"
GSIEGRYWS

SEQ ID NO: 539 - protein, 9 aa, Artificial Sequence
  source: /note="Description of Artificial Sequence: Synthetic peptide"
GSISGRYWS

SEQ ID NO: 540 - protein, 9 aa, Artificial Sequence
  source: /note="Description of Artificial Sequence: Synthetic peptide"
GSISSYYWS

SEQ ID NO: 541 - protein, 17 aa, Artificial Sequence
  source: /note="Description of Artificial Sequence: Synthetic peptide"
AISGTGISTYYADSVKG

SEQ ID NO: 542 - protein, 6 aa, Artificial Sequence
  source: /note="Description of Artificial Sequence: Synthetic peptide"
SGTGIS

SEQ ID NO: 543 - protein, 8 aa, Artificial Sequence
  source: /note="Description of Artificial Sequence: Synthetic peptide"
ISGTGIST

SEQ ID NO: 544 - protein, 124 aa, Artificial Sequence
  source: /note="Description of Artificial Sequence: Synthetic polypeptide"
EVQLLESGGGLVQPGGSLRLSCAASGFTFSRYAMSWVRQAPGKGLEWVSAISGTGISTYYADSVKGRFTISRDNSKNTLYLQMNSLRAEDTAVYYCARGGLYGSGSYLSDFDLWGRGTLVTVSS

SEQ ID NO: 545 - protein, 11 aa, Artificial Sequence
  source: /note="Description of Artificial Sequence: Synthetic peptide"
RASQSISSWLA

SEQ ID NO: 546 - protein, 7 aa, Artificial Sequence
  source: /note="Description of Artificial Sequence: Synthetic peptide"
DASSLES

SEQ ID NO: 547 - protein, 8 aa, Artificial Sequence
  source: /note="Description of Artificial Sequence: Synthetic peptide"
QQSNTFYT

SEQ ID NO: 548 - protein, 7 aa, Artificial Sequence
  source: /note="Description of Artificial Sequence: Synthetic peptide"
SQSISSW

SEQ ID NO: 549 - protein, 3 aa, Artificial Sequence
  source: /note="Description of Artificial Sequence: Synthetic peptide"
DAS

SEQ ID NO: 550 - protein, 225 aa, Artificial Sequence
  source: /note="Description of Artificial Sequence: Synthetic polypeptide"
QVQLQESGPGLVKPSETLSLTCTVSGGSIERYYWSWIRQPPGKGLEWIGYIYGRGSTNYNPSLKSRVTISVDTSKNQFSLKLSSVTAADTAVYYCARESQESPYNNWFDPWGQGTLVTVSSASTKGPSVFPLAPCSRSTSESTAALGCLVKDYFPEPVTVSWNSGALTSGVHTFPAVLQSSGLYSLSSVVTVPSSSLGTKTYTCNVDHKPSNTKVDKRVESKYGP

SEQ ID NO: 551 - protein, 5 aa, Artificial Sequence
  source: /note="Description of Artificial Sequence: Synthetic peptide"
SNTFY

SEQ ID NO: 552 - protein, 6 aa, Artificial Sequence
  source: /note="Description of Artificial Sequence: Synthetic peptide"
QSISSW

SEQ ID NO: 553 - protein, 106 aa, Artificial Sequence
  source: /note="Description of Artificial Sequence: Synthetic polypeptide"
DIQMTQSPSTLSASVGDRVTITCRASQSISSWLAWYQQKPGKAPKLLIYDASSLESGVPSRFSGSGSGTEFTLTISSLQPDDFATYYCQQSNTFYTFGGGTKVEIK

SEQ ID NO: 554 - protein, 17 aa, Artificial Sequence
  source: /note="Description of Artificial Sequence: Synthetic peptide"
AISGTGLSTYYADSVKG

SEQ ID NO: 555 - protein, 6 aa, Artificial Sequence
  source: /note="Description of Artificial Sequence: Synthetic peptide"
SGTGLS

SEQ ID NO: 556 - protein, 8 aa, Artificial Sequence
  source: /note="Description of Artificial Sequence: Synthetic peptide"
ISGTGLST

SEQ ID NO: 557 - protein, 124 aa, Artificial Sequence
  source: /note="Description of Artificial Sequence: Synthetic polypeptide"
EVQLLESGGGLVQPGGSLRLSCAASGFTFSRYAMSWVRQAPGKGLEWVSAISGTGLSTYYADSVKGRFTISRDNSKNTLYLQMNSLRAEDTAVYYCARGGLYGSGSYLSDFDLWGRGTLVTVSS

SEQ ID NO: 558 - protein, 10 aa, Artificial Sequence
  source: /note="Description of Artificial Sequence: Synthetic peptide"
GYTFTYYWMH

SEQ ID NO: 559 - protein, 17 aa, Artificial Sequence
  source: /note="Description of Artificial Sequence: Synthetic peptide"
SINPNSGSTNYAQKFQG

SEQ ID NO: 560 - protein, 18 aa, Artificial Sequence
  source: /note="Description of Artificial Sequence: Synthetic peptide"
DTGGDKSPLTYYYYGMDV

SEQ ID NO: 561 - protein, 5 aa, Artificial Sequence
  source: /note="Description of Artificial Sequence: Synthetic peptide"
YYWMH

SEQ ID NO: 562 - protein, 7 aa, Artificial Sequence
  source: /note="Description of Artificial Sequence: Synthetic peptide"
GYTFTYY

SEQ ID NO: 563 - protein, 6 aa, Artificial Sequence
  source: /note="Description of Artificial Sequence: Synthetic peptide"
NPNSGS

SEQ ID NO: 564 - protein, 8 aa, Artificial Sequence
  source: /note="Description of Artificial Sequence: Synthetic peptide"
GYTFTYYW

SEQ ID NO: 565 - protein, 8 aa, Artificial Sequence
  source: /note="Description of Artificial Sequence: Synthetic peptide"
INPNSGST

SEQ ID NO: 566 - protein, 20 aa, Artificial Sequence
  source: /note="Description of Artificial Sequence: Synthetic peptide"
ARDTGGDKSPLTYYYYGMDV

SEQ ID NO: 567 - protein, 9 aa, Artificial Sequence
  source: /note="Description of Artificial Sequence: Synthetic peptide"
YTFTYYWMH

SEQ ID NO: 568 - protein, 127 aa, Artificial Sequence
  source: /note="Description of Artificial Sequence: Synthetic polypeptide"
QVQLVQSGAEVKKPGASVKVSCKASGYTFTYYWMHWVRQAPGQGLEWMGSINPNSGSTNYAQKFQGRVTMTRDTSISTAYMELSRLRSDDTAVYYCARDTGGDKSPLTYYYYGMDVWGQGTTVTVSS

SEQ ID NO: 569 - protein, 11 aa, Artificial Sequence
  source: /note="Description of Artificial Sequence: Synthetic peptide"
RASQGISRWLA

SEQ ID NO: 570 - protein, 10 aa, Artificial Sequence
  source: /note="Description of Artificial Sequence: Synthetic peptide"
QQAIALPPFT

SEQ ID NO: 571 - protein, 7 aa, Artificial Sequence
  source: /note="Description of Artificial Sequence: Synthetic peptide"
SQGISRW

SEQ ID NO: 572 - protein, 7 aa, Artificial Sequence
  source: /note="Description of Artificial Sequence: Synthetic peptide"
AIALPPF

SEQ ID NO: 573 - protein, 6 aa, Artificial Sequence
  source: /note="Description of Artificial Sequence: Synthetic peptide"
QGISRW

SEQ ID NO: 574 - protein, 108 aa, Artificial Sequence
  source: /note="Description of Artificial Sequence: Synthetic polypeptide"
DIQMTQSPSSVSASVGDRVTITCRASQGISRWLAWYQQKPGKAPKLLIYAASSLQSGVPSRFSGSGSGTDFTLTISSLQPEDFATYYCQQAIALPPFTFGGGTKVEIK

SEQ ID NO: 575 - protein, 10 aa, Artificial Sequence
  source: /note="Description of Artificial Sequence: Synthetic peptide"
GFTFSSYWMS

SEQ ID NO: 576 - protein, 17 aa, Artificial Sequence
  source: /note="Description of Artificial Sequence: Synthetic peptide"
NIKQDGSEKYYVDSVKG

SEQ ID NO: 577 - protein, 19 aa, Artificial Sequence
  source: /note="Description of Artificial Sequence: Synthetic peptide"
APEYYSTTTRLYYYYGMDV

SEQ ID NO: 578 - protein, 5 aa, Artificial Sequence
  source: /note="Description of Artificial Sequence: Synthetic peptide"
SYWMS

SEQ ID NO: 579 - protein, 6 aa, Artificial Sequence
  source: /note="Description of Artificial Sequence: Synthetic peptide"
KQDGSE

SEQ ID NO: 580 - protein, 8 aa, Artificial Sequence
  source: /note="Description of Artificial Sequence: Synthetic peptide"
GFTFSSYW

SEQ ID NO: 581 - protein, 8 aa, Artificial Sequence
  source: /note="Description of Artificial Sequence: Synthetic peptide"
IKQDGSEK

SEQ ID NO: 582 - protein, 21 aa, Artificial Sequence
  source: /note="Description of Artificial Sequence: Synthetic peptide"
ARAPEYYSTTTRLYYYYGMDV

SEQ ID NO: 583 - protein, 9 aa, Artificial Sequence
  source: /note="Description of Artificial Sequence: Synthetic peptide"
FTFSSYWMS

SEQ ID NO: 584 - protein, 128 aa, Artificial Sequence
  source: /note="Description of Artificial Sequence: Synthetic polypeptide"
EVQLVESGGGLVQPGGSLRLSCAASGFTFSSYWMSWVRQAPGKGLEWVANIKQDGSEKYYVDSVKGRFTISRDNAKNSLYLQMNSLRAEDTAVYYCARAPEYYSTTTRLYYYYGMDVWGQGTTVTVSS

SEQ ID NO: 585 - protein, 17 aa, Artificial Sequence
  source: /note="Description of Artificial Sequence: Synthetic peptide"
KSSQSVLYSSNNKNYLA

SEQ ID NO: 586 - protein, 7 aa, Artificial Sequence
  source: /note="Description of Artificial Sequence: Synthetic peptide"
WASTRES

SEQ ID NO: 587 - protein, 9 aa, Artificial Sequence
  source: /note="Description of Artificial Sequence: Synthetic peptide"
QQYDAHPFT

SEQ ID NO: 588 - protein, 13 aa, Artificial Sequence
  source: /note="Description of Artificial Sequence: Synthetic peptide"
SQSVLYSSNNKNY

SEQ ID NO: 589 - protein, 3 aa, Artificial Sequence
  source: /note="Description of Artificial Sequence: Synthetic peptide"
WAS

SEQ ID NO: 590 - protein, 6 aa, Artificial Sequence
  source: /note="Description of Artificial Sequence: Synthetic peptide"
YDAHPF

SEQ ID NO: 591 - protein, 12 aa, Artificial Sequence
  source: /note="Description of Artificial Sequence: Synthetic peptide"
QSVLYSSNNKNY

SEQ ID NO: 592 - protein, 113 aa, Artificial Sequence
  source: /note="Description of Artificial Sequence: Synthetic polypeptide"
DIVMTQSPDSLAVSLGERATINCKSSQSVLYSSNNKNYLAWYQQKPGQPPKLLIYWASTRESGVPDRFSGSGSGTDFTLTISSLQAEDVAVYYCQQYDAHPFTFGGGTKVEIK

SEQ ID NO: 593 - protein, 10 aa, Artificial Sequence
  source: /note="Description of Artificial Sequence: Synthetic peptide"
GGTFSSYAIS

SEQ ID NO: 594 - protein, 17 aa, Artificial Sequence
  source: /note="Description of Artificial Sequence: Synthetic peptide"
GIIPIFGTANYAQKFQG

SEQ ID NO: 595 - protein, 16 aa, Artificial Sequence
  source: /note="Description of Artificial Sequence: Synthetic peptide"
HYYDYWSGYYTNTGIY

SEQ ID NO: 596 - protein, 5 aa, Artificial Sequence
  source: /note="Description of Artificial Sequence: Synthetic peptide"
SYAIS

SEQ ID NO: 597 - protein, 7 aa, Artificial Sequence
  source: /note="Description of Artificial Sequence: Synthetic peptide"
GGTFSSY

SEQ ID NO: 598 - protein, 6 aa, Artificial Sequence
  source: /note="Description of Artificial Sequence: Synthetic peptide"
IPIFGT

SEQ ID NO: 599 - protein, 8 aa, Artificial Sequence
  source: /note="Description of Artificial Sequence: Synthetic peptide"
GGTFSSYA

SEQ ID NO: 600 - protein, 8 aa, Artificial Sequence
  source: /note="Description of Artificial Sequence: Synthetic peptide"
IIPIFGTA

SEQ ID NO: 601 - protein, 18 aa, Artificial Sequence
  source: /note="Description of Artificial Sequence: Synthetic peptide"
ARHYYDYWSGYYTNTGIY

SEQ ID NO: 602 - protein, 9 aa, Artificial Sequence
  source: /note="Description of Artificial Sequence: Synthetic peptide"
GTFSSYAIS

SEQ ID NO: 603 - protein, 125 aa, Artificial Sequence
  source: /note="Description of Artificial Sequence: Synthetic polypeptide"
QVQLVQSGAEVKKPGSSVKVSCKASGGTFSSYAISWVRQAPGQGLEWMGGIIPIFGTANYAQKFQGRVTITADESTSTAYMELSSLRSEDTAVYYCARHYYDYWSGYYTNTGIYWGQGTLVTVSS

SEQ ID NO: 604 - protein, 11 aa, Artificial Sequence
  source: /note="Description of Artificial Sequence: Synthetic peptide"
RASQSVSSNLA

SEQ ID NO: 605 - protein, 9 aa, Artificial Sequence
  source: /note="Description of Artificial Sequence: Synthetic peptide"
QQSGALPIT

SEQ ID NO: 606 - protein, 7 aa, Artificial Sequence
  source: /note="Description of Artificial Sequence: Synthetic peptide"
SQSVSSN

SEQ ID NO: 607 - protein, 6 aa, Artificial Sequence
  source: /note="Description of Artificial Sequence: Synthetic peptide"
SGALPI

SEQ ID NO: 608 - protein, 6 aa, Artificial Sequence
  source: /note="Description of Artificial Sequence: Synthetic peptide"
QSVSSN

SEQ ID NO: 609 - protein, 107 aa, Artificial Sequence
  source: /note="Description of Artificial Sequence: Synthetic polypeptide"
EIVMTQSPATLSVSPGERATLSCRASQSVSSNLAWYQQKPGQAPRLLIYGASTRATGIPARFSGSGSGTEFTLTISSLQSEDFAVYYCQQSGALPITFGGGTKVEIK

SEQ ID NO: 610 - protein, 10 aa, Artificial Sequence
  source: /note="Description of Artificial Sequence: Synthetic peptide"
GGSFLRYYWS

SEQ ID NO: 611 - protein, 16 aa, Artificial Sequence
  source: /note="Description of Artificial Sequence: Synthetic peptide"
EIDHSGSTNYNPSLKS

SEQ ID NO: 612 - protein, 15 aa, Artificial Sequence
  source: /note="Description of Artificial Sequence: Synthetic peptide"
GQNYYGSGSADGFDP

SEQ ID NO: 613 - protein, 7 aa, Artificial Sequence
  source: /note="Description of Artificial Sequence: Synthetic peptide"
GGSFLRY

SEQ ID NO: 614 - protein, 5 aa, Artificial Sequence
  source: /note="Description of Artificial Sequence: Synthetic peptide"
DHSGS

SEQ ID NO: 615 - protein, 8 aa, Artificial Sequence
  source: /note="Description of Artificial Sequence: Synthetic peptide"
GGSFLRYY

SEQ ID NO: 616 - protein, 7 aa, Artificial Sequence
  source: /note="Description of Artificial Sequence: Synthetic peptide"
IDHSGST

SEQ ID NO: 617 - protein, 17 aa, Artificial Sequence
  source: /note="Description of Artificial Sequence: Synthetic peptide"
ARGQNYYGSGSADGFDP

SEQ ID NO: 618 - protein, 9 aa, Artificial Sequence
  source: /note="Description of Artificial Sequence: Synthetic peptide"
GSFLRYYWS

SEQ ID NO: 619 - protein, 123 aa, Artificial Sequence
  source: /note="Description of Artificial Sequence: Synthetic polypeptide"
QVQLQQWGAGLLKPSETLSLTCAVYGGSFLRYYWSWIRQPPGKGLEWIGEIDHSGSTNYNPSLKSRVTISVDTSKNQFSLKLSSVTAADTAVYYCARGQNYYGSGSADGFDPWGQGTLVTVSS

SEQ ID NO: 620 - protein, 9 aa, Artificial Sequence
  source: /note="Description of Artificial Sequence: Synthetic peptide"
QQANSFPPT

SEQ ID NO: 621 - protein, 6 aa, Artificial Sequence
  source: /note="Description of Artificial Sequence: Synthetic peptide"
ANSFPP

SEQ ID NO: 622 - protein, 107 aa, Artificial Sequence
  source: /note="Description of Artificial Sequence: Synthetic polypeptide"
DIQMTQSPSSVSASVGDRVTITCRASQGISSWLAWYQQKPGKAPKLLIYAASSLQSGVPSRFSGSGSGTDFTLTISSLQPEDFATYYCQQANSFPPTFGGGTKVEIK

SEQ ID NO: 623 - protein, 10 aa, Artificial Sequence
  source: /note="Description of Artificial Sequence: Synthetic peptide"
GGSFSGYYWS

SEQ ID NO: 624 - protein, 16 aa, Artificial Sequence
  source: /note="Description of Artificial Sequence: Synthetic peptide"
EIDASGSTRYNPSLKS

SEQ ID NO: 625 - protein, 9 aa, Artificial Sequence
  source: /note="Description of Artificial Sequence: Synthetic peptide"
PLYDAYLDV

SEQ ID NO: 626 - protein, 5 aa, Artificial Sequence
  source: /note="Description of Artificial Sequence: Synthetic peptide"
GYYWS

SEQ ID NO: 627 - protein, 7 aa, Artificial Sequence
  source: /note="Description of Artificial Sequence: Synthetic peptide"
GGSFSGY

SEQ ID NO: 628 - protein, 5 aa, Artificial Sequence
  source: /note="Description of Artificial Sequence: Synthetic peptide"
DASGS

SEQ ID NO: 629 - protein, 8 aa, Artificial Sequence
  source: /note="Description of Artificial Sequence: Synthetic peptide"
GGSFSGYY

SEQ ID NO: 630 - protein, 7 aa, Artificial Sequence
  source: /note="Description of Artificial Sequence: Synthetic peptide"
IDASGST

SEQ ID NO: 631 - protein, 11 aa, Artificial Sequence
  source: /note="Description of Artificial Sequence: Synthetic peptide"
ARPLYDAYLDV

SEQ ID NO: 632 - protein, 9 aa, Artificial Sequence
  source: /note="Description of Artificial Sequence: Synthetic peptide"
GSFSGYYWS

SEQ ID NO: 633 - protein, 117 aa, Artificial Sequence
  source: /note="Description of Artificial Sequence: Synthetic polypeptide"
QVQLQQWGAGLLKPSETLSLTCAVYGGSFSGYYWSWIRQPPGKGLEWIGEIDASGSTRYNPSLKSRVTISVDTSKNQFSLKLSSVTAADTAVYYCARPLYDAYLDVWGQGTMVTVSS

SEQ ID NO: 634 - protein, 9 aa, Artificial Sequence
  source: /note="Description of Artificial Sequence: Synthetic peptide"
QQAPIYPIT

SEQ ID NO: 635 - protein, 6 aa, Artificial Sequence
  source: /note="Description of Artificial Sequence: Synthetic peptide"
APIYPI

SEQ ID NO: 636 - protein, 107 aa, Artificial Sequence
  source: /note="Description of Artificial Sequence: Synthetic polypeptide"
DIQMTQSPSSVSASVGDRVTITCRASQGISSWLAWYQQKPGKAPKLLIYAASSLQSGVPSRFSGSGSGTDFTLTISSLQPEDFATYYCQQAPIYPITFGGGTKVEIK

SEQ ID NO: 637 - protein, 553 aa, Artificial Sequence
  source: /note="Description of Artificial Sequence: Synthetic polypeptide"
MCPRAARAPATLLLALGAVLWPAAGAWELTILHTNDVHSRLEQTSEDSSKCVNASRCMGGVARLFTKVQQIRRAEPNVLLLDAGDQYQGTIWFTVYKGAEVAHFMNALRYDAMALGNHEFDNGVEGLIEPLLKEAKFPILSANIKAKGPLASQISGLYLPYKVLPVGDEVVGIVGYTSKETPFLSNPGTNLVFEDEITALQPEVDKLKTLNVNKIIALGHSGFEMDKLIAQKVRGVDVVVGGHSNTFLYTGNPPSKEVPAGKYPFIVTSDDGRKVPVVQAYAFGKYLGYLKIEFDERGNVISSHGNPILLNSSIPEDPSIKADINKWRIKLDNYSTQELGKTIVYLDGSSQSCRFRECNMGNLICDAMINNNLRHADETFWNHVSMCILNGGGIRSPIDERNNGTITWENLAAVLPFGGTFDLVQLKGSTLKKAFEHSVHRYGQSTGEFLQVGGIHVVYDLSRKPGDRVVKLDVLCTKCRVPSYDPLKMDEVYKVILPNFLANGGDGFQMIKDELLRHDSGDQDINVVSTYISKMKVIYPAVEGRIKHHHHHH

SEQ ID NO: 638 - protein, 10 aa, Artificial Sequence
  source: /note="Description of Artificial Sequence: Synthetic peptide"
GYTFTTYWMH

SEQ ID NO: 639 - protein, 6 aa, Artificial Sequence
  source: /note="Description of Artificial Sequence: Synthetic 6xHis tag"
HHHHHH

SEQ ID NO: 640 - protein, 10 aa, Artificial Sequence
  source: /note="Description of Artificial Sequence: Synthetic peptide"
GYTFTSYWMY

SEQ ID NO: 641 - protein, 5 aa, Artificial Sequence
  source: /note="Description of Artificial Sequence: Synthetic peptide"
SYWMY

SEQ ID NO: 642 - protein, 17 aa, Artificial Sequence
  source: /note="Description of Artificial Sequence: Synthetic peptide"
RIDPNSGSTKYNEKFKN

SEQ ID NO: 643 - protein, 11 aa, Artificial Sequence
  source: /note="Description of Artificial Sequence: Synthetic peptide"
DYRKGLYAMDY

SEQ ID NO: 644 - protein, 7 aa, Artificial Sequence
  source: /note="Description of Artificial Sequence: Synthetic peptide"
GYTFTSY

SEQ ID NO: 645 - protein, 6 aa, Artificial Sequence
  source: /note="Description of Artificial Sequence: Synthetic peptide"
DPNSGS

SEQ ID NO: 646 - protein, 120 aa, Artificial Sequence
  source: /note="Description of Artificial Sequence: Synthetic polypeptide"
EVQLVQSGAEVKKPGATVKISCKVSGYTFTSYWMYWVRQARGQRLEWIGRIDPNSGSTKYNEKFKNRFTISRDNSKNTLYLQMNSLRAEDTAVYYCARDYRKGLYAMDYWGQGTTVTVSS

SEQ ID NO: 647 - DNA, 360 bp, Artificial Sequence
  source: /note="Description of Artificial Sequence: Synthetic polynucleotide"
gaagtgcagctggtgcagtcaggcgccgaagtgaagaaacccggcgctaccgtgaagattagctgtaaagtctcaggctacaccttcactagctactggatgtactgggtccgacaggctagagggcaaagactggagtggatcggtagaatcgaccctaatagcggctctactaagtataacgagaagtttaagaataggttcactattagtagggataactctaagaacaccctgtacctgcagatgaatagcctgagagccgaggacaccgccgtctactactgcgctagagactatagaaagggcctgtacgctatggactactggggtcaaggcactaccgtgaccgtgtcttca

SEQ ID NO: 648 - protein, 446 aa, Artificial Sequence
  source: /note="Description of Artificial Sequence: Synthetic polypeptide"
EVQLVQSGAEVKKPGATVKISCKVSGYTFTSYWMYWVRQARGQRLEWIGRIDPNSGSTKYNEKFKNRFTISRDNSKNTLYLQMNSLRAEDTAVYYCARDYRKGLYAMDYWGQGTTVTVSSASTKGPSVFPLAPCSRSTSESTAALGCLVKDYFPEPVTVSWNSGALTSGVHTFPAVLQSSGLYSLSSVVTVPSSSLGTKTYTCNVDHKPSNTKVDKRVESKYGPPCPPCPAPEFLGGPSVFLFPPKPKDTLMISRTPEVTCVVVDVSQEDPEVQFNWYVDGVEVHNAKTKPREEQFNSTYRVVSVLTVLHQDWLNGKEYKCKVSNKGLPSSIEKTISKAKGQPREPQVYTLPPSQEEMTKNQVSLTCLVKGFYPSDIAVEWESNGQPENNYKTTPPVLDSDGSFFLYSRLTVDKSRWQEGNVFSCSVMHEALHNHYTQKSLSLSLG

SEQ ID NO: 649 - protein, 11 aa, Artificial Sequence
  source: /note="Description of Artificial Sequence: Synthetic peptide"
KASQDVGTAVA

SEQ ID NO: 650 - protein, 7 aa, Artificial Sequence
  source: /note="Description of Artificial Sequence: Synthetic peptide"
WASTRHT

SEQ ID NO: 651 - protein, 9 aa, Artificial Sequence
  source: /note="Description of Artificial Sequence: Synthetic peptide"
QQYNSYPLT

SEQ ID NO: 652 - protein, 7 aa, Artificial Sequence
  source: /note="Description of Artificial Sequence: Synthetic peptide"
SQDVGTA

SEQ ID NO: 653 - protein, 3 aa, Artificial Sequence
  source: /note="Description of Artificial Sequence: Synthetic peptide"
WAS

SEQ ID NO: 654 - protein, 6 aa, Artificial Sequence
  source: /note="Description of Artificial Sequence: Synthetic peptide"
YNSYPL

SEQ ID NO: 655 - DNA, 1338 bp, Artificial Sequence
  source: /note="Description of Artificial Sequence: Synthetic polynucleotide"
gaagtgcagctggtgcagtcaggcgccgaagtgaagaaacccggcgctaccgtgaagattagctgtaaagtctcaggctacaccttcactagctactggatgtactgggtccgacaggctagagggcaaagactggagtggatcggtagaatcgaccctaatagcggctctactaagtataacgagaagtttaagaataggttcactattagtagggataactctaagaacaccctgtacctgcagatgaatagcctgagagccgaggacaccgccgtctactactgcgctagagactatagaaagggcctgtacgctatggactactggggtcaaggcactaccgtgaccgtgtcttcagctagcactaagggcccgtccgtgttccccctggcaccttgtagccggagcactagcgaatccaccgctgccctcggctgcctggtcaaggattacttcccggagcccgtgaccgtgtcctggaacagcggagccctgacctccggagtgcacaccttccccgctgtgctgcagagctccgggctgtactcgctgtcgtcggtggtcacggtgccttcatctagcctgggtaccaagacctacacttgcaacgtggaccacaagccttccaacactaaggtggacaagcgcgtcgaatcgaagtacggcccaccgtgcccgccttgtcccgcgccggagttcctcggcggtccctcggtctttctgttcccaccgaagcccaaggacactttgatgatttcccgcacccctgaagtgacatgcgtggtcgtggacgtgtcacaggaagatccggaggtgcagttcaattggtacgtggatggcgtcgaggtgcacaacgccaaaaccaagccgagggaggagcagttcaactccacttaccgcgtcgtgtccgtgctgacggtgctgcatcaggactggctgaacgggaaggagtacaagtgcaaagtgtccaacaagggacttcctagctcaatcgaaaagaccatctcgaaagccaagggacagccccgggaaccccaagtgtataccctgccaccgagccaggaagaaatgactaagaaccaagtctcattgacttgccttgtgaagggcttctacccatcggatatcgccgtggaatgggagtccaacggccagccggaaaacaactacaagaccacccctccggtgctggactcagacggatccttcttcctctactcgcggctgaccgtggataagagcagatggcaggagggaaatgtgttcagctgttctgtgatgcatgaagccctgcacaaccactacactcagaagtccctgtccctctccctggga

SEQ ID NO: 656 - protein, 107 aa, Artificial Sequence
  source: /note="Description of Artificial Sequence: Synthetic polypeptide"
AIQLTQSPSSLSASVGDRVTITCKASQDVGTAVAWYLQKPGQSPQLLIYWASTRHTGVPSRFSGSGSGTDFTFTISSLEAEDAATYYCQQYNSYPLTFGQGTKVEIK

SEQ ID NO: 657 - DNA, 321 bp, Artificial Sequence
  source: /note="Description of Artificial Sequence: Synthetic polynucleotide"
gctattcagctgactcagtcacctagtagcctgagcgctagtgtgggcgatagagtgactatcacctgtaaagcctctcaggacgtgggcaccgccgtggcctggtatctgcagaagcctggtcaatcacctcagctgctgatctactgggcctctactagacacaccggcgtgccctctaggtttagcggtagcggtagtggcaccgacttcaccttcactatctcttcactggaagccgaggacgccgctacctactactgtcagcagtataatagctaccccctgaccttcggtcaaggcactaaggtcgagattaag

SEQ ID NO: 658 - protein, 214 aa, Artificial Sequence
  source: /note="Description of Artificial Sequence: Synthetic polypeptide"
AIQLTQSPSSLSASVGDRVTITCKASQDVGTAVAWYLQKPGQSPQLLIYWASTRHTGVPSRFSGSGSGTDFTFTISSLEAEDAATYYCQQYNSYPLTFGQGTKVEIKRTVAAPSVFIFPPSDEQLKSGTASVVCLLNNFYPREAKVQWKVDNALQSGNSQESVTEQDSKDSTYSLSSTLTLSKADYEKHKVYACEVTHQGLSSPVTKSFNRGEC

SEQ ID NO: 659 - DNA, 642 bp, Artificial Sequence
  source: /note="Description of Artificial Sequence: Synthetic polynucleotide"
gctattcagctgactcagtcacctagtagcctgagcgctagtgtgggcgatagagtgactatcacctgtaaagcctctcaggacgtgggcaccgccgtggcctggtatctgcagaagcctggtcaatcacctcagctgctgatctactgggcctctactagacacaccggcgtgccctctaggtttagcggtagcggtagtggcaccgacttcaccttcactatctcttcactggaagccgaggacgccgctacctactactgtcagcagtataatagctaccccctgaccttcggtcaaggcactaaggtcgagattaagcgtacggtggccgctcccagcgtgttcatcttcccccccagcgacgagcagctgaagagcggcaccgccagcgtggtgtgcctgctgaacaacttctacccccgggaggccaaggtgcagtggaaggtggacaacgccctgcagagcggcaacagccaggagagcgtcaccgagcaggacagcaaggactccacctacagcctgagcagcaccctgaccctgagcaaggccgactacgagaagcataaggtgtacgcctgcgaggtgacccaccagggcctgtccagccccgtgaccaagagcttcaacaggggcgagtgc

SEQ ID NO: 660 - protein, 120 aa, Artificial Sequence
  source: /note="Description of Artificial Sequence: Synthetic polypeptide"
EVQLVQSGAEVKKPGATVKISCKVSGYTFTSYWMYWVRQATGQGLEWMGRIDPNSGSTKYNEKFKNRVTITADKSTSTAYMELSSLRSEDTAVYYCARDYRKGLYAMDYWGQGTTVTVSS

SEQ ID NO: 661 - DNA, 360 bp, Artificial Sequence
  source: /note="Description of Artificial Sequence: Synthetic polynucleotide"
gaagtgcagctggtgcagtcaggcgccgaagtgaagaaacccggcgctaccgtgaagattagctgtaaagtctcaggctacaccttcactagctactggatgtactgggtccgacaggctaccggtcaaggcctggagtggatgggtagaatcgaccctaatagcggctctactaagtataacgagaagtttaagaatagagtgactatcaccgccgataagtctactagcaccgcctatatggaactgtctagcctgagatcagaggacaccgccgtctactactgcgctagagactatagaaagggcctgtacgctatggactactggggtcaaggcactaccgtgaccgtgtcttca

SEQ ID NO: 662 - protein, 446 aa, Artificial Sequence
  source: /note="Description of Artificial Sequence: Synthetic polypeptide"
EVQLVQSGAEVKKPGATVKISCKVSGYTFTSYWMYWVRQATGQGLEWMGRIDPNSGSTKYNEKFKNRVTITADKSTSTAYMELSSLRSEDTAVYYCARDYRKGLYAMDYWGQGTTVTVSSASTKGPSVFPLAPCSRSTSESTAALGCLVKDYFPEPVTVSWNSGALTSGVHTFPAVLQSSGLYSLSSVVTVPSSSLGTKTYTCNVDHKPSNTKVDKRVESKYGPPCPPCPAPEFLGGPSVFLFPPKPKDTLMISRTPEVTCVVVDVSQEDPEVQFNWYVDGVEVHNAKTKPREEQFNSTYRVVSVLTVLHQDWLNGKEYKCKVSNKGLPSSIEKTISKAKGQPREPQVYTLPPSQEEMTKNQVSLTCLVKGFYPSDIAVEWESNGQPENNYKTTPPVLDSDGSFFLYSRLTVDKSRWQEGNVFSCSVMHEALHNHYTQKSLSLSLG

SEQ ID NO: 663 - DNA, 1338 bp, Artificial Sequence
  source: /note="Description of Artificial Sequence: Synthetic polynucleotide"
gaagtgcagctggtgcagtcaggcgccgaagtgaagaaacccggcgctaccgtgaagattagctgtaaagtctcaggctacaccttcactagctactggatgtactgggtccgacaggctaccggtcaaggcctggagtggatgggtagaatcgaccctaatagcggctctactaagtataacgagaagtttaagaatagagtgactatcaccgccgataagtctactagcaccgcctatatggaactgtctagcctgagatcagaggacaccgccgtctactactgcgctagagactatagaaagggcctgtacgctatggactactggggtcaaggcactaccgtgaccgtgtcttcagctagcactaagggcccgtccgtgttccccctggcaccttgtagccggagcactagcgaatccaccgctgccctcggctgcctggtcaaggattacttcccggagcccgtgaccgtgtcctggaacagcggagccctgacctccggagtgcacaccttccccgctgtgctgcagagctccgggctgtactcgctgtcgtcggtggtcacggtgccttcatctagcctgggtaccaagacctacacttgcaacgtggaccacaagccttccaacactaaggtggacaagcgcgtcgaatcgaagtacggcccaccgtgcccgccttgtcccgcgccggagttcctcggcggtccctcggtctttctgttcccaccgaagcccaaggacactttgatgatttcccgcacccctgaagtgacatgcgtggtcgtggacgtgtcacaggaagatccggaggtgcagttcaattggtacgtggatggcgtcgaggtgcacaacgccaaaaccaagccgagggaggagcagttcaactccacttaccgcgtcgtgtccgtgctgacggtgctgcatcaggactggctgaacgggaaggagtacaagtgcaaagtgtccaacaagggacttcctagctcaatcgaaaagaccatctcgaaagccaagggacagccccgggaaccccaagtgtataccctgccaccgagccaggaagaaatgactaagaaccaagtctcattgacttgccttgtgaagggcttctacccatcggatatcgccgtggaatgggagtccaacggccagccggaaaacaactacaagaccacccctccggtgctggactcagacggatccttcttcctctactcgcggctgaccgtggataagagcagatggcaggagggaaatgtgttcagctgttctgtgatgcatgaagccctgcacaaccactacactcagaagtccctgtccctctccctggga

SEQ ID NO: 664 - protein, 107 aa, Artificial Sequence
  source: /note="Description of Artificial Sequence: Synthetic polypeptide"
DVVMTQSPLSLPVTLGQPASISCKASQDVGTAVAWYQQKPGQAPRLLIYWASTRHTGVPSRFSGSGSGTEFTLTISSLQPDDFATYYCQQYNSYPLTFGQGTKVEIK

SEQ ID NO: 665 - DNA, 321 bp, Artificial Sequence
  source: /note="Description of Artificial Sequence: Synthetic polynucleotide"
gacgtcgtgatgactcagtcacccctgagcctgcccgtgaccctggggcagcccgcctctattagctgtaaagcctctcaggacgtgggcaccgccgtggcctggtatcagcagaagccagggcaagcccctagactgctgatctactgggcctctactagacacaccggcgtgccctctaggtttagcggtagcggtagtggcaccgagttcaccctgactatctcttcactgcagcccgacgacttcgctacctactactgtcagcagtataatagctaccccctgaccttcggtcaaggcactaaggtcgagattaag

SEQ ID NO: 666 - protein, 214 aa, Artificial Sequence
  source: /note="Description of Artificial Sequence: Synthetic polypeptide"
DVVMTQSPLSLPVTLGQPASISCKASQDVGTAVAWYQQKPGQAPRLLIYWASTRHTGVPSRFSGSGSGTEFTLTISSLQPDDFATYYCQQYNSYPLTFGQGTKVEIKRTVAAPSVFIFPPSDEQLKSGTASVVCLLNNFYPREAKVQWKVDNALQSGNSQESVTEQDSKDSTYSLSSTLTLSKADYEKHKVYACEVTHQGLSSPVTKSFNRGEC

SEQ ID NO: 667 - DNA, 642 bp, Artificial Sequence
  source: /note="Description of Artificial Sequence: Synthetic polynucleotide"
gacgtcgtgatgactcagtcacccctgagcctgcccgtgaccctggggcagcccgcctctattagctgtaaagcctctcaggacgtgggcaccgccgtggcctggtatcagcagaagccagggcaagcccctagactgctgatctactgggcctctactagacacaccggcgtgccctctaggtttagcggtagcggtagtggcaccgagttcaccctgactatctcttcactgcagcccgacgacttcgctacctactactgtcagcagtataatagctaccccctgaccttcggtcaaggcactaaggtcgagattaagcgtacggtggccgctcccagcgtgttcatcttcccccccagcgacgagcagctgaagagcggcaccgccagcgtggtgtgcctgctgaacaacttctacccccgggaggccaaggtgcagtggaaggtggacaacgccctgcagagcggcaacagccaggagagcgtcaccgagcaggacagcaaggactccacctacagcctgagcagcaccctgaccctgagcaaggccgactacgagaagcataaggtgtacgcctgcgaggtgacccaccagggcctgtccagccccgtgaccaagagcttcaacaggggcgagtgc

SEQ ID NO: 668 - DNA, 15 bp, Artificial Sequence
  source: /note="Description of Artificial Sequence: Synthetic oligonucleotide"
agctactggatgtac

SEQ ID NO: 669 - DNA, 51 bp, Artificial Sequence
  source: /note="Description of Artificial Sequence: Synthetic oligonucleotide"
agaatcgaccctaatagcggctctactaagtataacgagaagtttaagaat

SEQ ID NO: 670 - DNA, 33 bp, Artificial Sequence
  source: /note="Description of Artificial Sequence: Synthetic oligonucleotide"
gactatagaaagggcctgtacgctatggactac

SEQ ID NO: 671 - DNA, 21 bp, Artificial Sequence
  source: /note="Description of Artificial Sequence: Synthetic oligonucleotide"
ggctacaccttcactagctac

SEQ ID NO: 672 - DNA, 18 bp, Artificial Sequence
  source: /note="Description of Artificial Sequence: Synthetic oligonucleotide"
gaccctaatagcggctct

SEQ ID NO: 673 - DNA, 33 bp, Artificial Sequence
  source: /note="Description of Artificial Sequence: Synthetic oligonucleotide"
aaagcctctcaggacgtgggcaccgccgtggcc

SEQ ID NO: 674 - DNA, 21 bp, Artificial Sequence
  source: /note="Description of Artificial Sequence: Synthetic oligonucleotide"
tgggcctctactagacacacc

SEQ ID NO: 675 - DNA, 27 bp, Artificial Sequence
  source: /note="Description of Artificial Sequence: Synthetic oligonucleotide"
cagcagtataatagctaccccctgacc

SEQ ID NO: 676 - DNA, 21 bp, Artificial Sequence
  source: /note="Description of Artificial Sequence: Synthetic oligonucleotide"
tctcaggacgtgggcaccgcc

SEQ ID NO: 677 - DNA, 9 bp, Artificial Sequence
  source: /note="Description of Artificial Sequence: Synthetic oligonucleotide"
tgggcctct

SEQ ID NO: 678 - DNA, 18 bp, Artificial Sequence
  source: /note="Description of Artificial Sequence: Synthetic oligonucleotide"
tataatagctaccccctg

SEQ ID NO: 679 - protein, 448 aa, Artificial Sequence
  source: /note="Description of Artificial Sequence: Synthetic polypeptide"
EVQLVESGGGLVQPGGSLRLSCAASGFTFSDSWIHWVRQAPGKGLEWVAWISPYGGSTYYADSVKGRFTISADTSKNTAYLQMNSLRAEDTAVYYCARRHWPGGFDYWGQGTLVTVSSASTKGPSVFPLAPSSKSTSGGTAALGCLVKDYFPEPVTVSWNSGALTSGVHTFPAVLQSSGLYSLSSVVTVPSSSLGTQTYICNVNHKPSNTKVDKKVEPKSCDKTHTCPPCPAPELLGGPSVFLFPPKPKDTLMISRTPEVTCVVVDVSHEDPEVKFNWYVDGVEVHNAKTKPREEQYASTYRVVSVLTVLHQDWLNGKEYKCKVSNKALPAPIEKTISKAKGQPREPQVYTLPPSREEMTKNQVSLTCLVKGFYPSDIAVEWESNGQPENNYKTTPPVLDSDGSFFLYSKLTVDKSRWQQGNVFSCSVMHEALHNHYTQKSLSLSPGK

SEQ ID NO: 680 - protein, 214 aa, Artificial Sequence
  source: /note="Description of Artificial Sequence: Synthetic polypeptide"
DIQMTQSPSSLSASVGDRVTITCRASQDVSTAVAWYQQKPGKAPKLLIYSASFLYSGVPSRFSGSGSGTDFTLTISSLQPEDFATYYCQQYLYHPATFGQGTKVEIKRTVAAPSVFIFPPSDEQLKSGTASVVCLLNNFYPREAKVQWKVDNALQSGNSQESVTEQDSKDSTYSLSSTLTLSKADYEKHKVYACEVTHQGLSSPVTKSFNRGEC

SEQ ID NO: 681 - protein, 450 aa, Artificial Sequence
  source: /note="Description of Artificial Sequence: Synthetic polypeptide"
EVQLLESGGGLVQPGGSLRLSCAASGFTFSSYIMMWVRQAPGKGLEWVSSIYPSGGITFYADTVKGRFTISRDNSKNTLYLQMNSLRAEDTAVYYCARIKLGTVTTVDYWGQGTLVTVSSASTKGPSVFPLAPSSKSTSGGTAALGCLVKDYFPEPVTVSWNSGALTSGVHTFPAVLQSSGLYSLSSVVTVPSSSLGTQTYICNVNHKPSNTKVDKKVEPKSCDKTHTCPPCPAPELLGGPSVFLFPPKPKDTLMISRTPEVTCVVVDVSHEDPEVKFNWYVDGVEVHNAKTKPREEQYNSTYRVVSVLTVLHQDWLNGKEYKCKVSNKALPAPIEKTISKAKGQPREPQVYTLPPSRDELTKNQVSLTCLVKGFYPSDIAVEWESNGQPENNYKTTPPVLDSDGSFFLYSKLTVDKSRWQQGNVFSCSVMHEALHNHYTQKSLSLSPGK

SEQ ID NO: 682 - protein, 216 aa, Artificial Sequence
  source: /note="Description of Artificial Sequence: Synthetic polypeptide"
QSALTQPASVSGSPGQSITISCTGTSSDVGGYNYVSWYQQHPGKAPKLMIYDVSNRPSGVSNRFSGSKSGNTASLTISGLQAEDEADYYCSSYTSSSTRVFGTGTKVTVLGQPKANPTVTLFPPSSEELQANKATLVCLISDFYPGAVTVAWKADGSPVKAGVETTKPSKQSNNKYAASSYLSLTPEQWKSHRSYSCQVTHEGSTVEKTVAPTECS

SEQ ID NO: 683 - protein, 451 aa, Artificial Sequence
  source: /note="Description of Artificial Sequence: Synthetic polypeptide"
EVQLVESGGGLVQPGGSLRLSCAASGFTFSRYWMSWVRQAPGKGLEWVANIKQDGSEKYYVDSVKGRFTISRDNAKNSLYLQMNSLRAEDTAVYYCAREGGWFGELAFDYWGQGTLVTVSSASTKGPSVFPLAPSSKSTSGGTAALGCLVKDYFPEPVTVSWNSGALTSGVHTFPAVLQSSGLYSLSSVVTVPSSSLGTQTYICNVNHKPSNTKVDKRVEPKSCDKTHTCPPCPAPEFEGGPSVFLFPPKPKDTLMISRTPEVTCVVVDVSHEDPEVKFNWYVDGVEVHNAKTKPREEQYNSTYRVVSVLTVLHQDWLNGKEYKCKVSNKALPASIEKTISKAKGQPREPQVYTLPPSREEMTKNQVSLTCLVKGFYPSDIAVEWESNGQPENNYKTTPPVLDSDGSFFLYSKLTVDKSRWQQGNVFSCSVMHEALHNHYTQKSLSLSPGK

SEQ ID NO: 684 - protein, 215 aa, Artificial Sequence
  source: /note="Description of Artificial Sequence: Synthetic polypeptide"
EIVLTQSPGTLSLSPGERATLSCRASQRVSSSYLAWYQQKPGQAPRLLIYDASSRATGIPDRFSGSGSGTDFTLTISRLEPEDFAVYYCQQYGSLPWTFGQGTKVEIKRTVAAPSVFIFPPSDEQLKSGTASVVCLLNNFYPREAKVQWKVDNALQSGNSQESVTEQDSKDSTYSLSSTLTLSKADYEKHKVYACEVTHQGLSSPVTKSFNRGEC

SEQ ID NO: 685 - protein, 123 aa, Artificial Sequence
  source: /note="Description of Artificial Sequence: Synthetic polypeptide"
QVQLVQSGAEVKKPGSSVKVSCKTSGDTFSTYAISWVRQAPGQGLEWMGGIIPIFGKAHYAQKFQGRVTITADESTSTAYMELSSLRSEDTAVYFCARKFHFVSGSPFGMDVWGQGTTVTVSS

SEQ ID NO: 686 - protein, 106 aa, Artificial Sequence
  source: /note="Description of Artificial Sequence: Synthetic polypeptide"
EIVLTQSPATLSLSPGERATLSCRASQSVSSYLAWYQQKPGQAPRLLIYDASNRATGIPARFSGSGSGTDFTLTISSLEPEDFAVYYCQQRSNWPTFGQGTKVEIK

SEQ ID NO: 687 - protein, 447 aa, Artificial Sequence
  source: /note="Description of Artificial Sequence: Synthetic polypeptide"
QVQLVQSGAEVKKPGSSVKVSCKASGYTFSSNVISWVRQAPGQGLEWMGGVIPIVDIANYAQRFKGRVTITADESTSTTYMELSSLRSEDTAVYYCASTLGLVLDAMDYWGQGTLVTVSSASTKGPSVFPLAPCSRSTSESTAALGCLVKDYFPEPVTVSWNSGALTSGVHTFPAVLQSSGLYSLSSVVTVPSSSLGTKTYTCNVDHKPSNTKVDKRVESKYGPPCPSCPAPEFLGGPSVFLFPPKPKDTLMISRTPEVTCVVVDVSQEDPEVQFNWYVDGVEVHNAKTKPREEQFNSTYRVVSVLTVLHQDWLNGKEYKCKVSNKGLPSSIEKTISKAKGQPREPQVYTLPPSQEEMTKNQVSLTCLVKGFYPSDIAVEWESNGQPENNYKTTPPVLDSDGSFFLYSRLTVDKSRWQEGNVFSCSVMHEALHNHYTQKSLSLSLGK

SEQ ID NO: 688 - protein, 215 aa, Artificial Sequence
  source: /note="Description of Artificial Sequence: Synthetic polypeptide"
ETVLTQSPGTLSLSPGERATLSCRASQSLGSSYLAWYQQKPGQAPRLLIYGASSRAPGIPDRFSGSGSGTDFTLTISRLEPEDFAVYYCQQYADSPITFGQGTRLEIKRTVAAPSVFIFPPSDEQLKSGTASVVCLLNNFYPREAKVQWKVDNALQSGNSQESVTEQDSKDSTYSLSSTLTLSKADYEKHKVYACEVTHQGLSSPVTKSFNRGEC

SEQ ID NO: 689 - protein, 121 aa, Artificial Sequence
  source: /note="Description of Artificial Sequence: Synthetic polypeptide"
QVQLVQSGAEVKKPGSSVKVSCKASGGTFSSYAISWVRQAPGQGLEWMGGIIPIFGTANYAQKFQGRVTITADESTSTAYMELSSLRSEDTAVYYCARGLWEVRALPSVYWGQGTLVTVSS

SEQ ID NO: 690 - protein, 109 aa, Artificial Sequence
  source: /note="Description of Artificial Sequence: Synthetic polypeptide"
SYELTQPPSVSVAPGQTARITCGANDIGSKSVHWYQQKAGQAPVLVVSEDIIRPSGIPERISGSNSGNTATLTISRVEAGDEADYYCQVWDRDSDQYVFGTGTKVTVLG

SEQ ID NO: 691 - protein, 478 aa, Artificial Sequence
  source: /note="Description of Artificial Sequence: Synthetic polypeptide"
MLLVNQSHQGFNKEHTSKMVSAIVLYVLLAAAAHSAFATRDVREPPALKYGIVLDAGSSHTSMFIYKWPADKENDTGIVGQHSSCDVPGGGISSYADNPSGASQSLVGCLEQALQDVPKERHAGTPLYLGATAGMRLLNLTNPEASTSVLMAVTHTLTQYPFDFRGARILSGQEEGVFGWVTANYLLENFIKYGWVGRWFRPRKGTLGAMDLGGASTQITFETTSPAEDRASEVQLHLYGQHYRVYTHSFLCYGRDQVLQRLLASALQTHGFHPCWPRGFSTQVLLGDVYQSPCTMAQRPQNFNSSARVSLSGSSDPHLCRDLVSGLFSFSSCPFSRCSFNGVFQPPVAGNFVAFSAFFATVDFLRTSMGLPVATLQQLEAAAVNVCNQTWAQLQARVPGQRARLADYCAGAMFVQQLLSRGYGFDERAFGGVIFQKKAADTAVGWALGYMLNLTNLIPADPPGLRKGTDFSHHHHHH

SEQ ID NO: 692 - protein, 478 aa, Artificial Sequence
  source: /note="Description of Artificial Sequence: Synthetic polypeptide"
MLLVNQSHQGFNKEHTSKMVSAIVLYVLLAAAAHSAFATQDVREPPALKYGIVLDAGSSHTSMFVYKWPADKENDTGIVGQHSSCDVRGGGISSYANDPSRAGQSLVECLEQALRDVPKDRYASTPLYLGATAGMRLLNLTSPEATAKVLEAVTQTLTRYPFDFRGARILSGQDEGVFGWVTANYLLENFIKYGWVGRWIRPRKGTLGAMDLGGASTQITFETTSPSEDPDNEVHLRLYGQHYRVYTHSFLCYGRDQVLQRLLASALQIHRFHPCWPKGYSTQVLLREVYQSPCTMGQRPQTFNSSATVSLSGTSNAALCRDLVSGLFNISSCPFSQCSFNGVFQPPVAGNFIAFSAFYYTVDFLKTVMGLPVGTLKQLEDATETTCNQTWAELQARVPGQQTRLPDYCAVAMFIHQLLSRGYRFDERSFRGVVFEKKAADTAVGWALGYMLNLTNLIPADLPGLRKGTHFSHHHHHH
